(19) United States
(12) Patent Application Publication
(10) Pub. No.: US 2010/0247580 A1
(43) Pub. Date: Sep. 30, 2010

(54) Method for Classifying Cancer Patients as Responder or Non-Responder to Immunotherapy

(76) Inventors: Thierry Coche, Rixensart (BE); Swann Gaulis, Rixensart (BE); Jamila Louahed, Rixensart (BE)

Correspondence Address: GLAXOSMITHKLINE;GLOBAL PATENTS, C.2111F, FIVE MOORE DR., PO BOX 13398, RESEARCH TRIANGLE PARK, NC, 27709-3398, US

(21) Appl. No.: 12/744,612

(22) PCT Filed: Nov. 27, 2008
(86) PCT No.: PCT/EP08/66357

§ 371 Date: May 25, 2010

Related U.S. Application Data
(60) Provisional application No. 60/991,458, filed on Nov. 30, 2007.

(51) Int. Cl. A61K 39/00; C12Q 1/68; A61P 35/04

(52) U.S. Cl. 424/277.1; 435/6

(57) ABSTRACT

The present invention relates to gene expression profiles; methods for classifying patients; microarrays; and treatment of population of patients selected through use of methods and microarrays as described herein.

### FIELD OF THE INVENTION

[0001] The present invention relates to gene expression profiles; methods for classifying patients; microarrays; and treatment of populations of patients selected through use of methods and microarrays as described herein.

### BACKGROUND

[0002] Melanomas are tumours originating from melanocyte cells in the epidermis. Patients with malignant melanoma in distant metastasis (stage 1V according to the American Joint Commission on Cancer (AJCC) classification) have a median survival time of one year, with a long-term survival rate of only 5%. Even standard chemotherapy for stage 1V melanoma has therapeutic response rates of only 8-25%, but with no effect on overall survival. Patients with regional metastases (stage III) have a median survival of two to three years with very low chance of long-term survival, even after an adequate surgical control of the primary and regional metastases (Balch et al., 1992). Most patients with stage I to III melanoma have their tumour removed surgically, but these patients maintain a substantial risk of relapse.

[0003] There are two types of lung cancer: non-small cell lung cancer (NSCLC) and small cell lung cancer (SCLC). The names simply describe the type of cell found in the tumours. NSCLC includes squamous-cell carcinoma, adenocarcinoma, and large-cell carcinoma and accounts for around 80% of lung cancers. NSCLC is hard to cure and treatments available tend to have the aim of prolonging life, as far as possible, and relieving symptoms of disease. NSCLC is the most common type of lung cancer and is associated with poor outcome. Of all NSCLC patients, only about 25% have loco-regional disease at the time of diagnosis and are still amenable to surgical excision (stages IB, IIA or IIB according to the AJCC classification). However, more than 50% of these patients will relapse within the two years following the complete surgical resection. There is therefore a need to provide better treatment for these patients.

[0004] Traditional chemotherapy is based on administering toxic substances to the patient and relying, in part, on the aggressive uptake of the toxic agent by the tumour/cancer cells. These toxic substances adversely affect the patient's immune system, leaving the individual physically weakened and susceptible to infection.

[0005] It is known that not all patients with cancer respond to current cancer treatments. It is thought that only 30% or less of persons suffering from a cancer will respond to any given treatment. The cancers that do not respond to treatment are described as resistant. In many instances there have not been reliable methods for establishing if the patients will respond to treatment. However, administering treatment to patients who are both responders and non-responders because they cannot be differentiated is an inefficient use of resources and, even worse, can be damaging to the patient because, as discussed already, many cancer treatments have significant side effects, such as severe immunosuppression, emesis and/or alopecia. It is thought that in a number of cases patients receive treatment, when it is not necessary or when it will not be effective.

[0006] Cells, including cancer/tumour cells, express many hundreds even thousands of genes.

[0007] A large amount of work has been done in recent times to assist in the diagnosis and prognosis of cancer patients, for example to identify those patients who do not require further treatment because they have no risk of metastasis, recurrence or progression of the disease.

[0008] Immune-mediated treatments based on antigens, peptides, DNA and the like are under investigation. The strategy behind many of these treatments is to stimulate a patient's own immune system into fighting the cancer. One immune mediated treatment is described as Antigen-Specific Cancer Immunotherapy (ASCI).

### STATEMENT OF THE INVENTION

[0009] In one embodiment, the present invention provides a method for classifying a patient as a responder or non-responder to therapy, comprising measuring, in a patient-derived sample, the gene product of at least one gene selected from the genes listed in Table 1, 2, 4, 5 or 6.

[0010] By therapy is meant chemotherapy or radiotherapy, or antigen-specific immunotherapy (ASCI) as described herein, for example MAGE antigen specific cancer immunotherapy as described herein, or administration of a composition, vaccine or immunogenic composition as described herein. Therapy may additionally mean another form of therapy, for example passive immunotherapy or the targeting of tumour tissue or cells/receptors therein through other therapeutic means.

[0011] In one embodiment there is provided a method comprising the step of: applying a statistical analysis to the results of measuring differential expression of one or more of the genes in Table 1, 2, 4, 5 or 6 or a combination thereof in a biological sample for differentiating responders and/or non-responders to an appropriate immunotherapy. The method may comprise the steps:
[0012] a) measuring differential expression of one or more of the genes in Table 1, 2, 4, 5 or 6 or a combination thereof in a biological sample, and
[0013] b) applying a statistical analysis to the results of step a) to differentiate a responders and/or non-responder to an appropriate immunotherapy.

[0014] In one embodiment, the statistical analysis is employed on data generated in relation to differential regulation of substantially all the genes in Table 1, Table 2, Table 4, Table 5 or Table 6. The statistical analysis employed may be a T-test, such as a Baldi analysis.

[0015] In one embodiment there is provided a use of a gene list of substantially all the genes in Table 1, Table 2, Table 4, Table 5 or Table 6 or a combination thereof to perform an analysis of whether a patient will be a likely responder or non-responder to an immunotherapy, such as cancer immunotherapy. In a further embodiment there is provided use (or a method of use) of a gene list of substantially all the genes in Table 1, Table 2, Table 4, Table 5 or Table 6 or a combination thereof or data generated therefrom for treatment, particularly for the treatment of cancer. The method or use may further comprise administering a therapeutically effective amount of an appropriate immunotherapy, such as a cancer immunotherapy, particularly MAGE.

[0016] In one embodiment, the present invention provides a method for the detection of a gene signature, indicative of a responder or non-responder to therapy, such as cancer immunotherapy, employing novel gene(s)/gene lists, which method comprises the step of:
[0017] a) applying a statistical analysis to the results of measuring in a biological sample differential expression of one or more of the genes in Table 1, 2, 4, 5 or 6 or a combination thereof for differentiating a responder and/or non-responder to an appropriate immunotherapy.

[0018] In one aspect the invention provides a method for the detection of a gene signature, indicative of a responder or non-responder to therapy, such as cancer immunotherapy, employing novel gene(s)/gene lists, which method comprises the steps of:
[0019] a) measuring differential expression of one or more of the genes in Table 1, 2, 4, 5 or 6 or a combination thereof in a biological sample, and
[0020] b) applying a statistical analysis to differentiate responders and/or non-responders to an appropriate immunotherapy.

[0021] Whilst not wishing to be bound by theory it is hypothesised that the gene signature identified in at least Tables 1 and 2 is in fact indicative of an immune/inflammatory response, such as a T cell infiltration/activation response in the patients who are designated as responders, for example, the signature may represent a T-cell activation marker. The presence of this response is thought to assist the patient's body to fight the disease, such as cancer, after administration of a therapy, for example an immunotherapy, thereby rendering a patient more responsive to the therapy.

[0022] Thus the signatures of the present invention do not generally focus on markers/genes specifically associated with the diagnosis and/or prognosis of cancer, such as oncogenes, but rather is predictive of whether the patient will respond to an appropriate immunotherapy, such as cancer immunotherapy.

[0023] Thus in one aspect the invention provides a method of identifying whether a cancer patient will be a responder or non-responder to therapy, such as cancer immunotherapy, the method comprising:
[0024] (a) analysing a sample comprising mRNA or cDNA, or fragments thereof, expressed by genes of cancerous cells for differential expression of one or more genes selected from the group comprising or consisting of genes listed in Table 1, 2, 4, 5, 6 or a combination thereof; and
[0025] (b) characterising a patient as a responder or a non-responder based on the results of step 1.

[0026] The genes may be selected from genes in Tables 1, 2, 4, 5 and/or 6.

[0027] In one embodiment the invention employs one or more (such as substantially all) the genes listed in Tables 1, 2, or 5 respectively.

[0028] In one embodiment the invention employs one or more, for example all or substantially all, of the genes listed in Table 1.

[0029] In one embodiment the invention employs one or more, for example all or substantially all, of the genes listed in Table 2.

[0030] In one embodiment the invention employs one or more, for example all or substantially all, of the genes listed in Table 4.

[0031] In one embodiment the invention employs one or more, for example all or substantially all, of the genes listed in Table 5.

[0032] In one embodiment the invention employs one or more, for example all or substantially all, of the genes listed in Table 6.

[0033] Substantially all in the context of the gene lists will be at least 90%, such a 95%, particularly 96, 97, 98 or 99% of the genes in the given list.

[0034] In one aspect the invention is employed in a metastatic setting.

[0035] Differential expression in the context of the present invention means the gene is upregulated or downregulated in comparison to its normal expression. Statistical methods for calculating gene differentiation are discussed below.

[0036] Whilst not wishing to be bound by theory it is thought that at least the genes in Tables 1, 2 and 5 are strongly differentially expressed, which may render certain aspects of the invention particularly advantageous.

[0037] If a gene is always upregulated or always down regulated in patients that are deemed to be responders (or alternatively non-responders) then this single gene can be used to establish if the patient is a responder or a non-responder once a threshold is established and provided the separation of the two groups is adequate.

[0038] In one aspect the invention provides a gene profile for identifying a responder comprising one or more of said genes wherein 50, 60, 70, 75, 80, 85, 90, 95, 99 or 100% of the genes are upregulated. In contrast, in non-responders, the gene/genes is/are not upregulated or is/are down regulated.

[0039] In one aspect the present invention provides a therapy or cancer immunotherapy for the treatment of melanoma, lung cancer for example NSCLC, bladder cancer, neck cancer, colon cancer, breast cancer, oesophageal carcinoma and/or prostate cancer, such as lung cancer and/or melanoma, in particular melanoma

### BRIEF DESCRIPTION OF THE FIGURES

[0040] FIG. 1—Performance of the clinical outcome prediction of first data stratification under increasing number of differentially expressed probe sets.

[0041] FIG. 2—Performance of the clinical outcome prediction of second data stratification under increasing number of differentially expressed probe sets.

[0042] FIG. 3—Performance of clinical outcome predictions versus threshold level

[0043] FIG. 4—Multivariate analysis (Correspondence analysis) on the Baldi generated list.

[0044] FIG. 5—Axes that correlate with the segregation of the samples and genes by gender and response.

[0045] FIG. 6—Figure showing that genes of interest for classification of patients are those located close to the Response axis.

[0046] FIG. 7—the training set for Table 5 represented as an index.

[0047] FIG. 8—shows the gene list of Table 5 used to predict on a small number of samples.

[0048] FIG. 9—Appendix A.

[0049] FIG. 10—Appendix B.

[0050] FIG. 11—protein D—MAGE-A3 fusion protein.

[0051] FIG. 12—protein D partner protein.

### DETAILED DESCRIPTION

### Sequence Identifiers and Tables

[0052] The following sequence identifiers are included in the sequence listing:

[0053] SEQ ID NO:1-18 Probe set target sequences for 18 PS gene list

[0054] SEQ ID NO:19-268 Probe set target sequences for 250 PS gene list

[0055] SEQ ID NO:269-368 Probe set target sequences for 100 PS gene list

[0056] SEQ ID NO:369-473 Probe set target sequences for 105 PS gene list

[0057] SEQ ID NO:474-507 Probe set target sequences for 34 PS gene list

[0058] SEQ ID NO: 508-705: 18 PS gene list probe sequences

[0059] SEQ ID NO: 706-3452: 250 PS gene list probe sequences

[0060] SEQ ID NO: 3453-4557: 100 PS gene list probe sequences

[0061] SEQ ID NO: 4558-5717: 105 PS gene list probe sequences

[0062] SEQ ID NO: 5718-6091: 34 PS gene list probe sequences

[0063] SEQ ID NO: 6092 Protein D fusion partner protein (FIG. 12)

[0064] SEQ ID NO: 6093 Protein D—MAGE-A3 fusion protein (FIG. 11)

[0065] SEQ ID NO: 6094-6101 MAGE peptide sequences

[0066] SEQ ID NO: 6102-6106 CpG oligonucleotide sequences

As described in greater detail elsewhere, the following tables are set forth at the end of the description:
Table 1-18 PS gene list
Table 2—250 PS gene list
Table 3—Median and Standard Deviation Values for 250 PS gene list
Table 4—100 PS gene list
Table 5—105 PS gene list
Table 6—34 PS gene list
Table 7—Value of PS ID in the metagene for the 100 PS gene list
Table 8—Value of PS ID in the metagene for the 105 PS gene list
Table 9—Probe set target sequences for 18 PS gene list
Table 10—Probe set target sequences for 250 PS gene list
Table 11—Probe set target sequences for 100 PS gene list
Table 12—Probe set target sequences for 105 PS gene list
Table 13—Probe set target sequences for 34 PS gene list
Table 14—Sequences of probe sets—18 PS gene list
Table 15—Sequences of probe sets—250 PS gene list
Table 16—Sequences of probe sets—100 PS gene list
Table 17—Sequences of probe sets—105 PS gene list
Table 18—Sequences of probe sets—34 PS gene list

### Predictive Gene Profiles

[0067] “Responder” in the context of the present invention includes persons where the cancer/tumour(s) is eradicated, reduced or improved (Mixed Responder or Partial Responder) or simply stabilised such that the disease is not progressing (“Stable Disease”) after treatment. In responders where the cancer is stabilised then the period of stabilisation is such that the quality of life and/or patients life expectancy is increased (for example stable disease for more than 6, 7, 8, 9, 10, 11, 12, 13, 14, 15, 16, 17, 18, 19, 20, 21, 22, 23, 24 or more months) in comparison to a patient that does not receive treatment.

[0068] “Partial clinical responder” or “Partial Responder” in respect of cancer is wherein all of the tumours/cancers respond to treatment to some extent, for example where said cancer is reduced by 30, 40, 50, 60% or more.

[0069] “Mixed clinical responder” or “Mixed Responder” in respect of cancer is defined as wherein some of the tumours/cancers respond to treatment and others remain unchanged or progress.

[0070] Optionally the characterisation of the patient as a responder or non-responder can be performed by reference to a “standard” or a training set. The standard may be the profile of a person/patient who is known to be a responder or non-responder or alternatively may be a numerical value. Such pre-determined standards may be provided in any suitable form, such as a printed list or diagram, computer software program, or other media.

[0071] Training set in the context of the present specification is intended to refer to a group of samples for which the clinical results can be correlated with the gene profile and can be employed for training an appropriate statistical model/programme to identify responders and/or non-responder for new samples.

[0072] In one aspect to the invention the statistical analysis employed is a signal to noise classifier or a T-test such as Baldi analysis.

[0073] In another aspect the statistical analysis is a Pearson's Correlation Coefficient and/or Linear Discriminant

[0074] In another aspect the statistical analysis is Supervised Principal Components Analysis (SPCA).

[0075] In one aspect the statistical analysis is performed by reference to a “standard” or training set. The standard may be the profile of a person/patient who has a known clinical outcome or alternatively may be a numerical value. Such pre-determined standards may be provided in any suitable form, such as a printed list or diagram, computer software program, or other media. The gene lists in Table 1 and 2 were generated by correlating clinical outcome with gene profiles. A training set is then used to predict the classification for new samples.

[0076] In one aspect a mathematical model/algorithm/statistical method is employed to characterise the patient as responder or non-responder.

[0077] In one embodiment the responder and non-responder are defined by reference to the Time To Treatment Failure (TTTF), which is a continuous variable and may, for example, be measured in months. Where the time to treatment failure variable is large, for example when the patient does not relapse or show any disease progression for several months, the patient may be considered to be a responder. Where the time to treatment failure variable is small, for example the patient shows disease progression within three, four, five or six months, then patient may be considered to be a non-responder.

[0078] Treatment failure can be defined as where the patient does not fall with the definition of responder, partial responder or stable disease as defined herein. In one embodiment, using this approach, the mixed responders may be grouped with the responders.

[0079] However, in some embodiments, mixed responders may be grouped with the non-responders.

[0080] In one aspect non-responders may be defined as those with a TTTF of 6 months or less.

[0081] In one aspect the responders may be defined as those with a TTTF of more than 6 months, for example 7, 8, 9, 10, 11, 12, 13, 14, 15, 16, 17, 18, 19, 20, 21, 22, 23, 24 or more months.

[0082] The gene lists may be generated using Baldi analysis a variation of the classical T test, and/or Pearsons Correlation Coefficient and/or Linear Discriminant analysis. See for example Van't Veer L J, Dai H, van de Vijver M J, He Y D, Hart A A, Mao M, Peterse H L, van der Kooy K, Marton M J, Witteveen A T, et al. (2002) Gene expression profiling predicts clinical outcome of breast cancer. Nature, 415(6871), 530-556.

[0083] In one aspect the invention provides a gene profile generated by performing a pre-processing step to produce a gene intensity matrix and subjecting this matrix to a signal to noise statistical analysis to identify the differentially expressed genes and then ranking the genes in order of most differentially expressed gene.

[0084] In one method a threshold may be established by plotting a measure of the expression of the relevant gene for each patient. Generally the responders and the non-responders will be clustered about a different axis/focal point. A threshold can be established in the gap between the clusters by classical statistical methods or simply plotting a “best fit line” to establish the middle ground between the two groups. Values, for example, above the pre-defined threshold can be designated as responders and values, for example below the pre-designated threshold can be designated as non-responders.

[0085] In one method the performance of any given classifier can be analysed. Exhaustive performance analysis is done by varying the level of the threshold and calculating, for each value of the threshold, the predictive ability of the model (sensitivity, specificity, positive and negative prediction value, accuracy). The results of one such an analysis are shown graphically in FIG. 3. This analysis can assist in selecting an appropriate threshold for a given classifier.

[0086] Based on the analysis in FIG. 3 setting the threshold at 0.9 will result in the best performance (best compromise) for that particular classifier. At this value of the threshold setting, the model has the following predictive performance on an independent set of samples:

### Sensitivity: 82%

### Specificity: 80%

### PPV: 87%

### NPV: 72%

### Accuracy: 81

[0087] The performance must be calculated for each specific classifier that may be employed. FIG. 3 and the information above is provided by way of example only.

[0088] In addition performance analysis of the classifier can be done to for a given threshold value to evaluate the sensitivity, specificity, positive and negative prediction values and accuracy of the model. See for example FIG. 1 which shows a diagrammatic representation of the performance of the classifiers for a given threshold.

[0089] In one aspect the threshold is set at 0.5, 0.6, 0.7, 0.75, 0.8, 0.85 or 0.9.

[0090] In profiles provided by one or more aspects of the invention, the effect of genes that are closely correlated with gender are excluded. This may have an advantage that in these profiles are useful regardless of gender.

[0091] Once the gene profile has been identified and the analysis on the samples has been performed then there are a number of ways of presenting the results, for example as a heat map showing responders in one colour and non-responders in another colour. Nevertheless more qualitative information can be represented as an index that shows the results as a spectrum with a threshold, for example above the threshold patients are considered responders and below the threshold patients are considered to be non-responders. The advantage of presenting the information as a spectrum is that it allows a physician to decide whether to provide treatment for those patients thought to be non-responders, but who are located near the threshold.

[0092] “Immunotherapy” in the context of the invention means therapy based on stimulating an immune response, generally to an antigen, wherein the response results in the treatment, amelioration and/or retardation of the progression of a disease associated therewith. Treatment in this context would not usually include prophylactic treatment.

[0093] Cancer immunotherapy in the context of this specification means immunotherapy for the treatment of cancer. In one aspect the immunotherapy is based on a cancer testis antigen, such as MAGE (discussed in more detail below).

[0094] Advantageously, the novel method of the invention allows the identification of patients likely to respond to appropriate immunotherapy treatment. This facilitates the appropriate channelling of resources to patients who will benefit from them and what is more allow patients who will not benefit from the treatment to use alternative treatments that may be more beneficial for them.

[0095] This invention may be used for identifying cancer patients that are likely to respond to appropriate immunotherapy, for example patients with melanoma, breast, bladder, lung, NSCLC, head and neck cancer, squamous cell carcinoma, colon carcinoma and oesophageal carcinoma, such as in patients with MAGE-expressing cancers. In an embodiment, the invention may be used in an adjuvant (post-operative, for example disease-free) setting in such cancers, particularly lung and melanoma. The invention also finds utility in the treatment of cancers in the metastatic setting.

[0096] Thus in a first aspect the invention provides a signature indicative of a patient, such as a cancer patient, designated a responder or non-responder to treatment with an appropriate therapy, for example immunotherapy, the signature comprising differential expression of one or more genes selected from a gene list comprising or consisting a list of Table 1, 2, 4, 5, 6 or a mixture thereof.

[0097] “Immune activation gene” is intended to mean a gene whose product (eg mRNA or protein expressed from the gene) facilitates, increases, stimulates or is associated with an appropriate immune response. “Immune response gene” and “immune activation gene” are used interchangeably herein.

### Measurement of a Gene Profile/Level of Differential Expression

[0098] In the context of the present invention, the term “gene product” is intended to mean the mRNA or protein encoded by a gene, or cDNA that corresponds to the encoded mRNA.

[0099] An important technique for the analysis of the genes expressed by cells, such as cancer/tumour cells, is DNA microarray (also known as gene chip technology), where hundreds or more probe sequences (such as 55,000 probe sets) are attached to a glass surface. The probe sequences are generally all 25 mers or 60 mers and are sequences from known genes. These probes are generally arranged in a set of 11 individual probes (a probe set) and are fixed in a predefined pattern on the glass surface. Once exposed to an appropriate biological sample these probes hybridise to the relevant RNA or DNA of a particular gene. After washing, the chip is “read” by an appropriate method and a quantity such as colour intensity recorded. The differential expression of a particular gene is proportional to the measure/intensity recorded. This technology is discussed in more detail below.

[0100] Another useful technique for the measurement of protein gene products is through use of proteomic technology.

[0101] Once a target gene/profile has been identified there are several analytical methods to measure whether the gene(s)/profile(s) is/are differentially expressed. For DNA, these analytical techniques include real-time polymerase chain reaction, also called quantitative real time polymerase chain reaction (QRT-PCR or Q-PCR), which is used to simultaneously quantify and amplify a specific part of a given DNA molecule present in the sample.

[0102] The procedure follows the general pattern of polymerase chain reaction, but the DNA is quantified after each round of amplification (the “real-time” aspect). Two common methods of quantification are the use of fluorescent dyes that intercalate with double-strand DNA, and modified DNA oligonucleotide probes that fluoresce when hybridized with a complementary DNA.

[0103] The basic idea behind real-time polymerase chain reaction is that the more abundant a particular cDNA (and thus mRNA) is in a sample, the earlier it will be detected during repeated cycles of amplification. Various systems exist which allow the amplification of DNA to be followed and they often involve the use of a fluorescent dye which is incorporated into newly synthesised DNA molecules during real-time amplification. Real-time polymerase chain reaction machines, which control the thermocycling process, can then detect the abundance of fluorescent DNA and thus the amplification progress of a given sample. Typically, amplification of a given cDNA over time follows a curve, with an initial flat-phase, followed by an exponential phase. Finally, as the experiment reagents are used up, DNA synthesis slows and the exponential curve flattens into a plateau.

[0104] Alternatively the mRNA or protein product of the target gene(s) may be measured by Northern Blot analysis, Western Blot and/or immunohistochemistry.

[0105] In one aspect the methods or analyses described herein are performed on tumour samples in which a tumour associated antigen, for example a cancer testis antigen, is expressed.

[0106] When a single gene is analysed by, for example, Q-PCR then the gene expression can be normalised by reference to a gene that remains constant, for example genes with the symbol H3F3A, GAPDH, TFRC, GUSB or PGK1. The normalisation can be performed by subtracting the value obtained for the constant gene from the value obtained for the gene under consideration.

[0107] A threshold may be established by plotting a measure of the expression of the relevant gene for each patient. Generally the eg. responders and non-responders will be clustered about a different axis/focal point. A threshold can be established in the gap between the clusters by classical statistical methods or simply plotting a “best fit line” to establish the middle ground between the two groups. Values, for example, above the pre-defined threshold can be designated as responders and values, for example below the pre-designated threshold can be designated as non-responders.

### Microarrays

[0108] A microarray is an array of discrete regions, typically nucleic acids, which are separate from one another and are typically arrayed at a density of between, about 100/cm² to 1000/cm², but can be arrayed at greater densities such as 10000/cm². The principle of a microarray experiment, is that mRNA from a given cell line or tissue is used to generate a labelled sample typically labelled cDNA, termed the ‘target’, which is hybridized in parallel to a large number of, nucleic acid sequences, typically DNA sequences, immobilised on a solid surface in an ordered array.

[0109] Tens of thousands of transcript species can be detected and quantified simultaneously. Although many different microarray systems have been developed the most commonly used systems today can be divided into two groups, according to the arrayed material: complementary DNA (cDNA) and oligonucleotide microarrays. The arrayed material has generally been termed the probe since it is equivalent to the probe used in a northern blot analysis. Probes for cDNA arrays are usually products of the polymerase chain reaction (PCR) generated from cDNA libraries or clone collections, using either vector-specific or gene-specific primers, and are printed onto glass slides or nylon membranes as spots at defined locations. Spots are typically 10-300 μm in size and are spaced about the same distance apart. Using this technique, arrays consisting of more than 30,000 cDNAs can be fitted onto the surface of a conventional microscope slide. For oligonucleotide arrays, short 20-25 mers are synthesized in situ, either by photolithography onto silicon wafers (high-density-oligonucleotide arrays from Affymetrix or by ink-jet technology (developed by Rosetta Inpharmatics, and licensed to Agilent Technologies). Alternatively, presynthesised oligonucleotides can be printed onto glass slides. Methods based on synthetic oligonucleotides offer the advantage that because sequence information alone is sufficient to generate the DNA to be arrayed, no time-consuming handling of cDNA resources is required. Also, probes can be designed to represent the most unique part of a given transcript, making the detection of closely related genes or splice variants possible. Although short oligonucleotides may result in less specific hybridization and reduced sensitivity, the arraying of pre-synthesised longer oligonucleotides (50-100 mers) has recently been developed to counteract these disadvantages.

[0110] Thus in performing a microarray to ascertain whether a patient presents a gene signature of the present invention, the following steps are performed: obtain mRNA from the sample and prepare nucleic acids targets, contact the array under conditions, typically as suggested by the manufactures of the microarray (suitably stringent hybridisation conditions such as 3×SSC, 0.1% SDS, at 50° C.) to bind corresponding probes on the array, wash if necessary to remove unbound nucleic acid targets and analyse the results.

[0111] It will be appreciated that the mRNA may be enriched for sequences of interest such as those in Table 1, 2, 4, 5 or 6 (or other embodiment of the invention) by methods known in the art, such as primer specific cDNA synthesis. The population may be further amplified, for example, by using PCR technology. The targets or probes are labelled to permit detection of the hybridisation of the target molecule to the microarray. Suitable labels include isotopic or fluorescent labels which can be incorporated into the probe.

[0112] Once a target gene/profile has been identified there are several alternative analytical methods to microarray that can be used to measure whether the gene(s) is/are differentially expressed.

[0113] Analytical techniques include real-time polymerase chain reaction, also called quantitative real time polymerase chain reaction (QRT-PCR or Q-PCR), which is used to simultaneously quantify and amplify a specific part of a given DNA molecule present in the sample.

[0114] PCR can be a more sensitive technique than microarray and may detect lower levels of differentially expressed genes. In one aspect of the present invention, the methods described herein, may use a PCR-based technique.

[0115] In one embodiment, a patient may be diagnosed to ascertain whether his/her tumour expresses the gene signature of the invention using a diagnostic kit based on PCR technology, in particular quantitative PCR (Q-PCR).

[0116] The procedure follows the general pattern of polymerase chain reaction, but the DNA is quantified after each round of amplification (the “real-time” aspect). Two common methods of quantification are the use of fluorescent dyes that intercalate with double-strand DNA, and modified DNA oligonucleotide probes that fluoresce when hybridized with a complementary DNA.

[0117] The basic idea behind real-time polymerase chain reaction is that the more abundant a particular cDNA (and thus mRNA) is in a sample, the earlier it will be detected during repeated cycles of amplification. Various systems exist which allow the amplification of DNA to be followed and they often involve the use of a fluorescent dye which is incorporated into newly synthesised DNA molecules during real-time amplification. Real-time polymerase chain reaction machines, which control the thermocycling process, can then detect the abundance of fluorescent DNA and thus the amplification progress of a given sample. Typically, amplification of a given cDNA over time follows a curve, with an initial flat-phase, followed by an exponential phase. Finally, as the experiment reagents are used up, DNA synthesis slows and the exponential curve flattens into a plateau.

[0118] Alternatively the mRNA or protein product of the target gene(s) may be measured by Northern Blot analysis, Western Blot and/or immunohistochemistry.

[0119] In one aspect the analysis to identify the profile/signature is performed on a patient sample wherein a cancer testis antigen is expressed.

[0120] When a single gene is analysed, for example, by Q-PCR then the gene expression can be normalised by reference to a gene that remains constant, for example genes with the symbol H3F3A, GAPDH, TFRC, GUSB or PGK1 may be suitable for employing in normalisation. The normalisation can be performed by subtracting the value obtained for the constant gene from the Ct value obtained for the gene under consideration.

[0121] One parameter used in quantifying the differential expression of genes is the fold change, which is a metric for comparing a gene's mRNA-expression level between two distinct experimental conditions. Its arithmetic definition differs between investigators. However, the higher the fold change the more likely that the differential expression of the relevant genes will be adequately separated, rendering it easier to decide which category (responder or non-responder) the patient falls into.

[0122] The fold change may, for example be at least 10, at least 15, at least 20 or 30.

[0123] Another parameter also used to quantify differential expression is the “p” value. It is thought that the lower the p value the more differentially expressed the gene is likely to be, which renders it a good candidate for use in profiles of the invention. P values may for example include 0.1 or less, such as 0.05 or less, in particular 0.01 or less. P values as used herein include corrected “P” values and/or also uncorrected “P” values.

[0124] This is thought to be in contrast to some other approaches which use genes that are strongly correlated with the disease/prognosis but not necessarily strongly differentially expressed.

[0125] As used herein, methods to predict a favourable clinical response or to identify subjects more likely to respond to therapy, is not meant to imply a 100% predictive ability, but to indicate that subjects with certain characteristics are more likely to experience a favourable clinical response to a specified therapy than subjects who lack such characteristics. However, as will be apparent to one skilled in the art, some individuals identified as more likely to experience a favourable clinical response may nonetheless fail to demonstrate measurable clinical response to the treatment. Similarly, some individuals predicted as non-responders may nonetheless exhibit a favourable clinical response to the treatment.

[0126] As used herein, a ‘favourable response’ (or ‘favourable clinical response’) to, for example, an anticancer treatment refers to a biological or physical response that is recognized by those skilled in the art as indicating a decreased rate of tumour growth, compared to tumour growth that would occur with an alternate treatment or the absence of any treatment. “Favourable clinical response” as used herein is not synonymous with a cure, but includes a “Response”, “Partial Response”, “Mixed Response” or “Stable Disease” as defined herein. A favourable clinical response to therapy may include a lessening of symptoms experienced by the subject, an increase in the expected or achieved survival time, a decreased rate of tumour growth, cessation of tumour growth (stable disease), regression in the number or mass of metastatic lesions, and/or regression of the overall tumour mass (each as compared to that which would occur in the absence of therapy, or in response to an alternate therapy).

[0127] Patients in need of treatment, for example, for cancer treatment such as for a MAGE-expressing tumour, and whose tumour cells have a gene signature described herein as a “Responder” signature are more likely to have a favourable clinical response, compared to patients whose tumour cells show a gene signature described herein as a “Non-Responder” signature, when treated with MAGE specific immunotherapy.

[0128] “Non-responder” in the context of this invention includes persons whose symptoms ie cancers/tumours are not improved or stabilised.

[0129] In one aspect of the invention “responder” may not include a “Mixed Responder”.

[0130] In one aspect the invention is greater than 50%, 60, 70 or 80% accurate such as about 81% accurate at predicting responders and non-responders correctly.

[0131] The invention also extends to separate embodiments according to the invention described herein, which comprise, consist essentially of, or consists of the components/elements described herein.

[0132] The invention extends to the functional equivalents of genes listed herein, for example as characterised by hierarchical classification of genes such as described by Hongwei Wu et al 2007(Hierarchical classification of equivalent genes in prokaryotes-Nucleic Acid Research Advance Access).

[0133] Whilst not wishing to be bound by theory, it is thought that is not necessarily the gene per se that is characteristic of the signature but rather it is the gene function which is fundamentally important. Thus a functionally equivalent gene to an immune activation gene such as those listed above, for example in Table 1, 2, 4, 5, 6 or mixtures thereof may be employed in the signature, see for example, Journal of the National Cancer Institute Vol 98, No. 7 Apr. 5, 2006.

[0134] The genes were identified by specific probes and thus a skilled person will understand that the description of the genes above is a description based on current understanding of what hybridises to the probe. However, regardless of the nomenclature used for the genes by repeating the hybridisation to the relevant probe under the prescribed conditions the requisite gene can be identified.

[0135] The invention extends to use of the profile(s) according to the invention for predicting or identifying a patient as a responder or non-responder to immunotherapy, such as cancer immunotherapy, for example cancer testis immunotherapy, in particular MAGE immunotherapy, especially for melanoma.

[0136] Thus the invention includes a method of analysing a patient derived sample, based on differential expression of the profile/gene(s) according to the invention for the purpose of characterising the patient from which the sample was derived as a responder or non-responder to immunotherapy according to the present invention

[0137] In one aspect the invention provides a method for measuring expression levels of polynucleotides from genes identified herein, in a sample for the purpose of identifying if the patient, from whom the sample was derived, is likely to be a responder or non-responder to immunotherapy such a cancer immunotherapy according to the present invention comprising the steps:
[0138] isolating the RNA from the sample,
[0139] optionally amplifying the copies of the cDNA from the sample for said genes, and
[0140] quantifying the levels of cDNA in the sample.

[0141] The invention provides a diagnostic kit comprising at least one component for performing an analysis on a patient derived sample to identify a profile according to the invention, the results of which may be used to designate a patient from which the sample was derived as a responder or non-responder to immunotherapy.

[0142] The kit may comprise materials/reagents for PCR (such as QPCR), microarray analysis, immunohistochemistry or other analytical technique that may be used for accessing differential expression of one or more genes.

[0143] The invention also provides a diagnostic kit comprising a set of probes capable of hybridising to the mRNA or cDNA of one or more, such as at least 5 genes described herein in relation to the invention, for example a diagnostic kit comprising or consisting of a set of probes capable of hybridising to the mRNA or its cDNA of 1, 2, 3, 4, 5, 6, 7, 8, 9, 10, 11, 12, 13, 14, 15, 16, 17 or all of the gene products recognised by the probe sets listed in Table 1.

[0144] The invention also provides a diagnostic kit comprising a set of probes capable of hybridising to the mRNA or cDNA of one or more, such as at least 5 genes described herein in relation to the invention, for example a diagnostic kit comprising or consisting of a set of probes capable of hybridising to the cDNA gene target sequence of 1, 2, 3, 4, 5, 6, 7, 8, 9, 10, 11, 12, 13, 14, 15, 16, 17 or all of the probe set target sequences listed in Table 9.

[0145] The invention also provides a diagnostic kit comprising or consisting of a set of probes capable of hybridising to the mRNA or its cDNA of one or more of 1-5,6-10, 11-15, 16-20, 21-25, 26-30, 31-35, 36-40, 41-45, 46-50, 51-55, 56-60, 61-65, 66-70, 71-75, 76-80, 81-85, 86-90, 91-95, 96-100, 101-5, 106-10, 111-5, 116-20, 121-5, 126-30, 131-5, 136-40, 141-5, 146-50, 151-5, 156-60, 161-65, 166-70, 171-5, 176-80, 181-5, 186-90, 191-5, 196-200, 201-5, 206-10, 211-5, 216-20, 221-5, 226-30, 231-5, 236-40, 241-5, 246-50 of the gene products recognised by the probe sets listed in Table 2 and/or any combination thereof.

[0146] The invention also provides a diagnostic kit comprising a set of probes capable of hybridising to the mRNA or cDNA of one or more, such as at least 5 genes described herein in relation to the invention, for example a diagnostic kit comprising or consisting of a set of probes capable of hybridising to the cDNA gene target sequence of 1-5,6-10, 11-15, 16-20, 21-25, 26-30, 31-35, 36-40, 41-45, 46-50, 51-55, 56-60, 61-65, 66-70, 71-75, 76-80, 81-85, 86-90, 91-95, 96-100, 101-5, 106-10, 111-5, 116-20, 121-5, 126-30, 131-5, 136-40, 141-5, 146-50, 151-5, 156-60, 161-65, 166-70, 171-5, 176-80, 181-5, 186-90, 191-5, 196-200, 201-5, 206-10, 211-5, 216-20, 221-5, 226-30, 231-5, 236-40, 241-5, 246-50 of the gene target sequences listed in Table 10, and/or any combination thereof.

[0147] The invention also provides a diagnostic kit comprising or consisting of a set of probes capable of hybridising to the mRNA or its cDNA of at least 5, 10, 15, 20, 25, 30, 35, 40, 45, 50, 55, 60, 65, 70, 75, 80, 85, 90, 95 or 100 of the genes recognised by the probe sets listed in Table 4.

[0148] The invention also provides a diagnostic kit comprising a set of probes capable of hybridising to the mRNA or cDNA of one or more, such as at least 5 genes described herein in relation to the invention, for example a diagnostic kit comprising or consisting of a set of probes capable of hybridising to the cDNA gene target sequence of at least 5, 10, 15, 20, 25, 30, 35, 40, 45, 50, 55, 60, 65, 70, 75, 80, 85, 90, 95 or 100 of the gene target sequences listed in Table 11.

[0149] The invention also provides a diagnostic kit comprising or consisting of a set of probes capable of hybridising to the mRNA or its cDNA of at least 5, 10, 15, 20, 25, 30, 35, 40, 45, 50, 55, 60, 65, 70, 75, 80, 85, 90, 95, 100 or 105 of the gene products recognised by the probe sets listed in Table 5.

[0150] The invention also provides a diagnostic kit comprising a set of probes capable of hybridising to the mRNA or cDNA of one or more, such as at least 5 genes described herein in relation to the invention, for example a diagnostic kit comprising or consisting of a set of probes capable of hybridising to the cDNA gene target sequence of at least 5, 10, 15, 20, 25, 30, 35, 40, 45, 50, 55, 60, 65, 70, 75, 80, 85, 90, 95, 100 or 105 of the gene target sequences listed in Table 12.

[0151] The invention also provides a diagnostic kit comprising or consisting of a set of probes capable of hybridising to the mRNA or cDNA of one or more, such as at least 5 genes described herein in relation to the invention, for example a diagnostic kit comprising or consisting of a set of probes capable of hybridising to the mRNA or its cDNA of at least 1, 2, 3, 4, 5, 6, 7, 8, 9, 10, 11, 12, 13, 14, 15, 16, 17, 18, 19, 20, 21, 22, 23, 24, 25, 26, 27, 28, 29, 30, 31, 32, 33 or all of the gene products recognised by the probe sets listed in Table 6.

[0152] The invention also provides a diagnostic kit comprising a set of probes capable of hybridising to the mRNA or cDNA of one or more, such as at least 5 genes described herein in relation to the invention, for example a diagnostic kit comprising or consisting of a set of probes capable of hybridising to the cDNA gene target sequence of 1, 2, 3, 4, 5, 6, 7, 8, 9, 10, 11, 12, 13, 14, 15, 16, 17, 18, 19, 20, 21, 22, 23, 24, 25, 26, 27, 28, 29, 30, 31, 32, 33 or all of the gene target sequences listed in Table 13.

[0153] The methods may further comprise the step of determining whether the gene products described herein, in a patient-derived sample, are upregulated and/or downregulated, or the step of analysis of expression by Pearson, Baldi Correlation or Cox analysis, in order to determine whether the patient is a responder or non-responder to therapy.

[0154] In another embodiment this invention relates to diagnostic kits. For example, diagnostic kits containing such microarrays comprising a microarray substrate and probes that are capable of hybridising to mRNA or cDNA expressed from, for example, 5, 6, 7, 8, 9, 10, 11, 12, 13, 14, 15, 16, 17, 18, 19, 20 21, 22, 23, 24, 25, 26, 27, 28, 29, 30, 31 or more genes, for example from a particular table such as substantially all of the genes in Table 1, 2, 4, 5 or 6 that are capable of demonstrating the gene signature of the invention.

[0155] In one aspect the invention provides microarrays adapted for identification of a signature according to the invention.

[0156] The invention also extends to substrates and probes suitable for hybridising to an mRNA or cDNA moiety expressed from one or more genes employed in the invention, for example from Table 1, 2, 4, 5 or 6.

[0157] Commercially available microarrays contain many more probes than are required to characterise the differential expression of the genes under consideration at any one time, to aid the accuracy of the analysis. Thus one or more probe sets may recognise the same gene.

[0158] Thus in one embodiment multiple probes or probe sets are used to identify differential expression, such as upregulation, of a gene according to any aspect of the invention herein described.

[0159] The diagnostic kit may, for example, comprise probes, which are arrayed in a microarray.

[0160] Specifically, prepared microarrays, for example, containing one or more probe sets described herein can readily be prepared by companies such as Affymetrix, thereby providing a specific test and optionally reagents for identifying the profile, according to the invention.

[0161] In an embodiment the microarrays or diagnostic kits will additionally be able to test for the presence or absence of tumour associated antigen gene product, for example a cancer testis antigen expressing gene such as the MAGE gene, or for example the gene product of one or more of the following antigens: Her-2/neu; P501S; WT-1; a MAGE antigen, for example MAGE 1, MAGE 2, MAGE 3, MAGE 4, MAGE 5, MAGE 6, MAGE 7, MAGE 8, MAGE 9, MAGE 10, MAGE 11, MAGE 12, MAGE-B1, MAGE-B2, MAGE-B3 and MAGE-B4, MAGE-C1 and MAGE-C2; PRAME; LAGE 1; NY-ESO-1; SSX-2; SSX-4; SSX-5; NA17; MELAN-A; Tyrosinase; P790; P510; P835; B305D; B854; CASB618; CASB7439 (HASH-2); C1491; C1584; and C1585.

[0162] Thus in one aspect the invention provides a probe and/or probe set suitable for said hybridisation, under appropriate conditions. The invention also extends to use of probes, for example as described herein or functional equivalents thereof, for the identification of a gene profile according to the present invention.

[0163] The invention herein described extends to use of all permutations of the probes listed herein (or functional analogues thereof) for identification of the said signature.

[0164] In one aspect the invention provides use of a probe for the identification of differential expression of at least one gene product of an immune activation gene for establishing if a gene profile according to the present invention is present in a patient derived sample.

[0165] In one aspect, this invention relates to oligonucleotide probes and primers capable of recognising the gene products of the genes of Table 1, 2, 4, 5, and/or 6 or any other profile as described herein and diagnostic kits based on these probes and primers.

[0166] Such kits may include probes or kits for the detection of a tumour associated antigen, for example one or more of the following antigens: Her-2/neu; P501S; WT-1; a MAGE antigen, for example MAGE 1, MAGE 2, MAGE 3, MAGE 4, MAGE 5, MAGE 6, MAGE 7, MAGE 8, MAGE 9, MAGE 10, MAGE 11, MAGE 12, MAGE-B1, MAGE-B2, MAGE-B3 and MAGE-B4, MAGE-C1 and MAGE-C2; PRAME; LAGE 1; NY-ESO-1; SSX-2; SSX-4; SSX-5; NA17; MELAN-A; Tyrosinase; P790; P510; P835; B305D; B854; CASB618; CASB7439 (HASH-2); C1491; C1584; and C1585.

[0167] In embodiments of the present invention in which hybridisation is employed, hybridisation will generally be preformed under stringent conditions, such as 3×SSC, 0.1% SDS, at 50° C.

[0168] Once target gene(s)/profile has/have been identified then it is well within the skilled person's ability to design alternative probes that hybridise to the same target. Therefore the invention also extends to probes, which under appropriate conditions measure the same differential expression of the gene(s) of the present invention to provide a signature/profile as described.

[0169] The invention also extends to use of the relevant probe in analysis of whether a cancer patient will be a responder or non-responder to treatment with an appropriate immunotherapy.

[0170] The invention also extends to use (and processes or methods employing same) of known microarrays for identification of a signature according to the invention.

[0171] A nucleic acid probe may be at least 10, 15, 20, 25, 30, 35, 40, 50, 75, 100 or more nucleotides in length and may comprise the full length gene. Probes for use in the invention are those that are able to hybridise specifically to the mRNA (or its cDNA) expressed from the genes listed in Table 1 2, 4, 5 or 6 under stringent conditions.

[0172] The invention further provides a method for the detection of a gene profile in a biological sample, the method comprising measuring the expression of 1, 2, 3, 4, 5, 6, 7, 8, 9, 10, 11, 12, 13, 14, 15, 16, 17 or all of the gene products recognised by the probe sets listed in Table 1. Alternatively, the method may comprise measuring the expression of the gene product recognised by 1-5,6-10, 11-18 of the probe sets listed in Table 1 and/or any combination thereof.

[0173] The invention further provides a method for the detection of a gene profile in a biological sample, the method comprising measuring the expression of one or more of 1-5,6-10, 11-15, 16-20, 21-25, 26-30, 31-35, 36-40, 41-45, 46-50, 51-55, 56-60, 61-65, 66-70, 71-75, 76-80, 81-85, 86-90, 91-95, 96-100, 101-5, 106-10, 111-5, 116-20, 121-5, 126-30, 131-5, 136-40, 141-5, 146-50, 151-5, 156-60, 161-65, 166-70, 171-5, 176-80, 181-5, 186-90, 191-5, 196-200, 201-5, 206-10, 211-5, 216-20, 221-5, 226-30, 231-5, 236-40, 241-5, 246-50 of the gene products recognised by the probe sets listed in Table 2, and/or any combination thereof.

[0174] The invention further provides a method for the detection of a gene profile in a biological sample, the method comprising measuring the expression of at least 5, 10, 15, 20, 25, 30, 35, 40, 45, 50, 55, 60, 65, 70, 75, 80, 85, 90, 95 or 100 of the gene products recognised by the probe sets listed in Table 4.

[0175] The invention further provides a method for the detection of a gene profile in a biological sample, the method comprising measuring the expression of at least 5, 10, 15, 20, 25, 30, 35, 40, 45, 50, 55, 60, 65, 70, 75, 80, 85, 90, 95, 100 or 105 of the gene products recognised by the probe sets listed in Table 5.

[0176] The invention further provides a method for the detection of a gene profile in a biological sample, the method comprising measuring the expression of at least 1, 2, 3, 4, 5, 6, 7, 8, 9, 10, 11, 12, 13, 14, 15, 16, 17, 18, 19, 20, 21, 22, 23, 24, 25, 26, 27, 28, 29, 30, 31, 32, 33 or all of the gene products recognised by the probe sets listed in Table 6.

[0177] In one embodiment of the present invention there is provided a method for classifying a patient as a responder or non-responder to therapy comprising measuring, in a patient-derived sample, the gene product of at least one gene selected from the genes listed in Table 1. The method may comprise measuring the gene product of 1, 2, 3, 4, 5, 6, 7, 8, 9, 10, 11, 12, 13, 14, 15, 16, 17 or 18 of the genes recognised by the probe sets listed in Table 1 and/or any combination thereof. Alternatively, the method may comprise measuring the gene product of at least 1, 5, 10, 15 or all of the genes of Table 1 or the genes recognised by the probe sets listed in Table 1. The methods may further comprise the step of using the data of Appendix A to determine whether a patient is a responder or non-responder.

[0178] In one embodiment of the present invention there is provided a method for classifying a patient as a responder or non-responder to therapy comprising measuring, in a patient-derived sample, the gene product of at least one gene selected from the genes listed in Table 2. The method may comprise measuring the gene product of one or more of 1-5, 6-10, 11-15, 16-20, 21-25, 26-30, 31-35, 36-40, 41-45, 46-50, 51-55, 56-60, 61-65, 66-70, 71-75, 76-80, 81-85, 86-90, 91-95, 96-100, 101-5, 106-10, 111-5, 116-20, 121-5, 126-30, 131-5, 136-40, 141-5, 146-50, 151-5, 156-60, 161-65, 166-70, 171-5, 176-80, 181-5, 186-90, 191-5, 196-200, 201-5, 206-10, 211-5, 216-20, 221-5, 226-30, 231-5, 236-40, 241-5, 246-50 of the gene products recognised by the probe sets listed in Table 2 and/or any combination thereof. The methods may further comprise the step of using the data of Appendix B to determine whether a patient is a responder or non-responder.

[0179] In one embodiment of the present invention there is provided a method for classifying a patient as a responder or non-responder to therapy comprising measuring, in a patient-derived sample, the gene product of at least one gene selected from the genes listed in Table 4. The method may comprise measuring the gene product of at least 5, 10, 15, 20, 25, 30, 35, 40, 45, 50, 55, 60, 65, 70, 75, 80, 85, 90, 95 or 100 of the genes recognised by the probe sets listed in Table 4. The methods may further comprise the step of classifying a sample using the value of the probe set ID in the metagene, provided in Table 7.

[0180] In one embodiment of the present invention there is provided a method for classifying a patient as a responder or non-responder to therapy comprising measuring, in a patient-derived sample, the gene product of at least one gene selected from the genes listed in Table 5. The method may comprise measuring the gene product of at least 5, 10, 15, 20, 25, 30, 35, 40, 45, 50, 55, 60, 65, 70, 75, 80, 85, 90, 95, 100 or 105 of the gene products recognised by the probe sets listed in Table 5. The methods may further comprise the step of classifying a sample using the value of the probe set ID in the metagene, provided in Table 8.

[0181] In one embodiment of the present invention there is provided a method for classifying a patient as a responder or non-responder to therapy comprising measuring, in a patient-derived sample, the gene product of at least one gene selected from the genes listed in Table 6. The method may comprise measuring the gene product of at least 1, 2, 3, 4, 5, 6, 7, 8, 9, 10, 11, 12, 13, 14, 15, 16, 17, 18, 19, 20, 21, 22, 23, 24, 25, 26, 27, 28, 29, 30, 31, 32, 33 or all of the gene products recognised by the probe sets listed in Table 6. The method may further comprise the step of using SPCA to analyse the level of expression of a gene product in a sample, for example by setting a threshold to classify responders and non-responders as described herein.

[0182] Thus in one aspect the invention provides a method of identifying whether a patient is a responder or non-responder to therapy, following surgical resection of a tumour, the method comprising: analysing a sample for differential expression of one or more genes or gene profiles as described herein and/or listed or shown in the Tables shown herein; and characterising a patient as being a responder or non-responder.

[0183] Thus in one aspect the invention provides a method of identifying whether a patient will be a responder or non-responder to immunotherapy, the method comprising: (a) analysing a patient-derived sample comprising mRNA or fragments thereof expressed by genes of cancerous cells or DNA or fragments thereof from cancerous cells, for differential expression of one or more genes indicative of T-cell infiltration/activation, for example selected from the group comprising or consisting of genes listed in Table 1, 2, 4, 5 or 6, and (b) characterising a patient as a responder or a non-responder based on the results of step (a).

[0184] In one embodiment of the invention described herein, the patient is a patient suffering from cancer or having a tumour, or a patient having had surgical removal or resection of a tumour or tumour tissue.

[0185] The present invention further relates to a method of screening the effects of a drug or therapy on a tissue or cell sample comprising the step of analysing the expression profile, employing any embodiment of the invention described herein before and after drug treatment or therapy. The invention therefore provides a method for screening for a drug or therapy, which would alter the gene profile to that of a patient having improved survival following treatment with, for example, MAGE antigen specific cancer immunotherapy (ie. to alter the gene profile to that of a responder), to enable the patient to benefit from, for example, MAGE antigen specific cancer immunotherapy.

[0186] In one embodiment, administration of a drug or therapy may be used to alter a patient's profile to that of a responder. The drug or therapy may comprise the drug or therapy identified through the method of screening described above. In one embodiment, the drug or therapy comprises topical administration of imiquimod: such topical administration is particularly suitable for a gene profile of external lesions or tumours, for example skin lesions. In one embodiment, the drug or therapy is local irradiation of the tumour. In one embodiment, the drug or therapy is selected from the group comprising: IL-2, IFN-α, dimethyltrizenoimidazolcarboxam (dacarbazine; DTIC) and temozolomide (TMZ).

[0187] In one embodiment, the table below describes possible drug or therapy administration that may be used to alter a profile:

| Tumor type | Tumor stage | Treatment |
|---|---|---|
| Metastatic | Unresectable | DTIC or TMZ as first-line treatment |
| melanoma | stage III or IV | First-line chemotherapy treatment other than DTIC only or |
| | | TMZ only (that may, but need not, include DTIC, TMZ, IL-2 or |
| | | IFNα) |
| | | Any second-line chemotherapy treatment |
| | | Local irradiation of cutaneous/subcutaneous tumor lesions |
| | | Local imiquimod |
| Non-small- | Any stage, if the | Chemo(radio)-therapy induction doublet neo-adjuvant |
| cell lung | patient is eligible | chemotherapy with platinum plus a second chemotherapy |
| cancer | for neo-adjuvant | drug. |
| | chemotherapy | [Note: Thus, induction radiotherapy is permitted.] |
| | with subsequent | |
| | resection | |

DTIC, dimethyltrizenoimidazolcarboxam (dacarbazine);
TMZ, temozolomide.

[0188] The present invention further provides a method of patient diagnosis comprising, for example, the step of analysing the expression profile according to any embodiment of the invention described herein and comparing it with a pre-determined standard to determine whether a patient is a “responder” and benefit from therapy, for example MAGE specific immunotherapy.

[0189] The invention includes a method of patient diagnosis comprising the step of analysing the expression profile according to any embodiment of the invention from a tumour tissue sample given by a patient and assessing, for example whether 1, 2, 3, 4, 5 or more of said genes are expressed, or comprising the step of using any method described herein.

[0190] Thus in clinical applications, tissue samples from a human patient may be screened for the presence and/or absence of the expression of, any embodiment of the invention described herein.

[0191] In an alternative aspect the invention provides a method further comprising the steps of analysing a tumour derived sample to determine which antigen(s) are expressed by the tumour and hence enabling administration of an a therapeutically effective amount of an appropriate therapy, for example an antigen specific cancer immunotherapeutic, for example where the tumour is found to be MAGE (such as MAGE A3) positive, appropriate treatment may, for example, include administration of MAGE A3 antigen specific immunotherapy.

### Samples

[0192] A sample such as tumour tissue of a patient is deemed to present the gene signature of the invention if one or more genes, such as described in any embodiment of the invention are differentially expressed (such as upregulated), and can be detected by microarray analysis or other appropriate analysis for example as described herein.

[0193] Thus in clinical applications, tissue samples from a human patient may be screened for the presence and/or absence of differential expression of a gene profile as described herein.

[0194] In the context of the present invention, the sample may be of any biological tissue or fluid derived from a patient potentially in need of treatment. The sample maybe derived from sputum, blood, urine, or from solid tissues such as biopsy from a primary tumour or metastasis, or from sections of previously removed tissues.

[0195] Samples could comprise or consist of, for example, needle biopsy cores, surgical resection samples or lymph node tissue. These methods include obtaining a biopsy, which is optionally fractionated by cryostat sectioning to enrich tumour cells to about 80% of the total cell population. In certain embodiments, nucleic acids extracted from these samples may be amplified using techniques well known in the art. The levels of selected markers in a profile can be detected and can be compared with statistically valid groups of, for example, MAGE positive non responder patients.

[0196] For cancer, the biological sample may contain cancer or tumour cells and may, for example, be derived from the cancer or tumour such as a fresh sample (including frozen samples) or a sample that has been preserved in paraffin. Having said this, samples preserved in paraffin can suffer from degradation and a profile observed may be modified. A person working the in field is well able to compensate of these changes observed by recalibrating the parameters of the profile.

[0197] In one aspect the biological sample is a biopsy sample, for example from a tumour or cancerous tissue.

Tables with Gene Lists

[0198] In one aspect a gene profile of the present invention comprises one or more genes listed in Table 1; in another aspect the profile comprises one or more genes listed in Table 2; in another aspect the profile comprises one or more genes listed in Table 4; in another aspect the profile comprises one or more genes listed in Table 5; in another aspect the profile comprises one or more genes listed in Table 6.

[0199] The tables list probe sets specific for certain regions of genes. In the tables listed herein a given gene may be listed more than once, for example as a specific gene or as a gene cluster. The given gene may be listed more than once because more than one probe set is listed in the table that is specific for the given gene.

[0200] In one aspect a profile comprises one or more genes selected from the genes or probe sets of Tables 1, 2, 4, 5 and/or 6 or one or more genes recognised by probe sets selected from the genes or probe sets of Tables 1, 2, 4, 5 and/or 6 including combinations thereof.

[0201] In a further aspect a profile comprises all the genes listed in Table 1 or genes recognised by probe sets listed in Table 1, all the genes listed in Table 2 or genes recognised by probe sets listed in Table 2, all the genes listed in Table 4 or genes recognised by probe sets listed in Table 4, all the genes listed in Table 5 or genes recognised by probe sets listed in Table 5 and/or all the genes listed in Table 6 or genes recognised by probe sets listed in Table 6 or combinations thereof.

[0202] In a further aspect a profile comprises at least 10% of the genes listed in Tables 1, 2, 4, 5 and/or 6 or genes recognised by the probe sets listed in the Tables, for example at least 40%, 50%, 60% or 70% such as 80%, 90% or 100% thereof.

[0203] One or more genes of Table 1 or genes recognises by probe sets of Table 1, as described herein, may include 1, 2, 3, 4, 5, 6, 7, 8, 9, 10, 11, 12, 13, 14, 15, 16, 17 or all of the genes or probe sets of Table 1, as appropriate, and/or any combination thereof.

[0204] One or more genes of Table 2 or genes recognises by probe sets of Table 2, as described herein, may include 1-5, 6-10, 11-15, 16-20, 21-25, 26-30, 31-35, 36-40, 41-45, 46-50, 51-55, 56-60, 61-65, 66-70, 71-75, 76-80, 81-85, 86-90, 91-95, 96-100, 101-5, 106-10, 111-5, 116-20, 121-5, 126-30, 131-5, 136-40, 141-5, 146-50, 151-5, 156-60, 161-65, 166-70, 171-5, 176-80, 181-5, 186-90, 191-5, 196-200, 201-5, 206-10, 211-5, 216-20, 221-5, 226-30, 231-5, 236-40, 241-5, 246-50 of the probe sets or genes of Table 2, as appropriate, and/or any combination thereof.

[0205] One or more genes of Table 4 or genes recognises by probe sets of Table 4, as described herein, may include 5, 10, 15, 20, 25, 30, 35, 40, 45, 50, 55, 60, 65, 70, 75, 80, 85, 90, 95 or 100 of the probe sets or genes of Table 4, as appropriate, and/or any combination thereof.

[0206] One or more genes of Table 5 or genes recognises by probe sets of Table 5, as described herein, may include 5, 10, 15, 20, 25, 30, 35, 40, 45, 50, 55, 60, 65, 70, 75, 80, 85, 90, 95, 100 or 105 of the probe sets or genes of Table 5, as appropriate, and/or any combination thereof.

[0207] One or more genes of Table 6 or genes recognises by probe sets of Table 6, as described herein, may include 1, 2, 3, 4, 5, 6, 7, 8, 9, 10, 11, 12, 13, 14, 15, 16, 17, 18, 19, 20, 21, 22, 23, 24, 25, 26, 27, 28, 29, 30, 31, 32, 33 or all of the probe sets or genes of Table 6, as appropriate, and/or any combination thereof.

### Immunotherapeutic Agents, or Immunotherapy

[0208] The terms “immunotherapeutics”, “immunotherapeutic agents” and “immunotherapy” are used interchangeably herein. The terms “MAGE specific immunotherapy” and “MAGE antigen specific immunotherapy” and other similar terms are used interchangeably herein.

[0209] In one embodiment, the therapy or immunotherapy for use in the present invention comprises or consists of, for example, a composition or immunogenic composition comprising a tumour associated antigen as described herein. The tumour associated antigen may be a MAGE antigen or derivative as described herein.

[0210] The therapy as described herein may be used or administered to prevent or ameliorate recurrence of disease. Such treatment may be given after resection by surgery of any tumour or after chemotherapy or radiotherapy treatment.

[0211] A further aspect of the invention is a method of treating a patient suffering from a tumour, for example a MAGE antigen expressing tumour, the method comprising determining whether a patient's tumour expresses a gene profile as described herein and then administering a composition or an immunogenic composition comprising a tumour associated antigen as described herein, for example a MAGE antigen as described herein, or by administration of a MAGE antigen specific immunotherapy to said patient.

[0212] By “antigen specific immunotherapy”, “antigen specific cancer immunotherapy” and/or “cancer immunotherapy” is meant a composition that targets an antigen, through administration of a composition comprising an antigen (active immunotherapy) as described herein, or through administration of an antibody or other specific binding agent that targets the antigen (passive immunotherapy). For example, “MAGE antigen specific immunotherapy”, “MAGE immunotherapy” or “MAGE specific immunotherapy” may comprise or consist of administration of a composition comprising a MAGE antigen or derivative as described herein.

[0213] In one embodiment of the invention, the antigen to be targeted is MAGE. The MAGE antigen or derivative as described herein may comprise a full length MAGE antigen or a peptide thereof as described herein. In one embodiment the antigen or derivative may comprise a MAGE-A3 protein or peptide, a MAGE antigen comprising the peptide or epitopes EVDPIGHLY (SEQ ID NO:6094), FLWGPRALV (SEQ ID NO:6095); MEVDPIGHLY (SEQ ID NO:6096); VHFLLLKYRA (SEQ ID NO:6097); LVHFLLLKYR (SEQ ID NO:6098); LKYRAREPVT (SEQ ID NO:6099); ACYEFLWGPRALVETS (SEQ ID NO:6100); and TQHFVQENYLEY (SEQ ID NO:6101); and/or a MAGE antigen or peptide as described herein fused or conjugated to a carrier protein as described herein, for example in which the carrier protein is selected from protein D, NS1 or CLytA or fragments thereof.

[0214] The composition or immunogenic composition as described herein may further comprise an adjuvant as described herein For example, the adjuvant may comprise one or more or any combination of: 3D-MPL; aluminium salts; CpG containing oligonucleotides; saponin-containing adjuvants such as QS21 or ISCOMs; oil-in-water emulsions; and liposomes.

[0215] The invention further provides the use of composition or immunogenic composition as described herein comprising a tumour associated antigen as described herein in the manufacture of a medicament for the treatment of patients determined to have or characterised as having a poor prognosis according to methods described herein.

[0216] In one aspect the invention provides use of a composition or immunotherapy as described herein in the manufacture of a medicament for the treatment of patients suffering from or susceptible to recurrence of a tumour, for example a MAGE antigen expressing tumour, in which the patient expresses a gene profile or gene product(s) as described herein.

[0217] Antigen Specific Cancer Immunotherapy (ASCIs) suitable for use in the invention may, for example include those capable of raising an antigen-specific immune response, for example a MAGE specific immune response. In one embodiment, the ASCI comprises a MAGE antigen as described herein.

[0218] Alternatively, for treatment of tumours expressing other antigens, other compositions or immunogenic compositions or ASCIs may be used. Examples of compositions or ASCIs suitable for use in the present invention include compositions or ASCIs containing antigens or cancer testis antigens such as PRAME, LAGE 1, NY-ESO-1 (LAGE 2), and others, for example details of which can be obtained from www.cancerimmunity.org/CTdatabase.

[0219] The compositions, immunogenic compositions, ASCI's or cancer immunotherapy may be based, for example, on one or more of the antigens discussed herein, or derivatives of such antigens, for example as described herein.

### Antigens

[0220] In one embodiment of the present invention, the antigen may consist or comprise of a MAGE tumour antigen, for example, MAGE 1, MAGE 2, MAGE 3, MAGE 4, MAGE 5, MAGE 6, MAGE 7, MAGE 8, MAGE 9, MAGE 10, MAGE 11 or MAGE 12. The genes encoding these MAGE antigens are located on chromosome X and share with each other 64 to 85% homology in their coding sequence. These antigens are sometimes known as MAGE A1, MAGE A2, MAGE A3, MAGE A4, MAGE A5, MAGE A6, MAGE A7, MAGE A8, MAGE A9, MAGE A 10, MAGE A11 and/or MAGE A12 (the MAGE A family). In one embodiment, of the present invention, the antigen is MAGE-A3.

[0221] In one embodiment, an antigen from one of two further MAGE families may be used: the MAGE B and MAGE C group. The MAGE B family includes MAGE B1 (also known as MAGE Xp1, and DAM 10), MAGE B2 (also known as MAGE Xp2 and DAM 6) MAGE B3 and MAGE B4—the MAGE C family currently includes MAGE C1 and MAGE C2.

[0222] In general terms, a MAGE protein can be defined as containing a core sequence signature located towards the C-terminal end of the protein (for example with respect to MAGE A1 a 309 amino acid protein, the core signature corresponds to amino acid 195-279). In general, a MAGE protein may be approximately 50% or more identical, such as 70, 80, 90, 95 or 99% identical, in this core region with amino acids 195 to 279 of MAGE A1.

[0223] The consensus pattern of the core signature is thus described as follows wherein x represents any amino acid, lower case residues are conserved (conservative variants allowed) and upper case residues are perfectly conserved.

### Core Sequence Signature

[0224] LixvL(2x)I(3x)g(2x)apEExiWexl(2x)m(3-4x)Gxe(3-4x)gxp(2x)IIt(3x)VqexYLxYxqVPxsxP(2x)yeFLWGprA(2x)Et(3x)kv Conservative substitutions are well known and are generally set up as the default scoring matrices in sequence alignment computer programs. These programs include PAM250 (Dayhoft M. O. et al., (1978), “A model of evolutionary changes in proteins”, In “Atlas of Protein sequence and structure” 5(3) M. O. Dayhoft (ed.), 345-352), National Biomedical Research Foundation, Washington, and Blosum 62 (Steven Henikoft and Jorja G. Henikoft (1992), “Amino acid substitution matricies from protein blocks”), Proc. Natl. Acad. Sci. USA 89 (Biochemistry): 10915-10919.

[0225] In general terms, substitution within the following groups are conservative substitutions, but substitutions between groups are considered non-conserved. The groups are:
[0226] i) Aspartate/asparagine/glutamate/glutamine
[0227] ii) Serine/threonine
[0228] iii) Lysine/arginine
[0229] iv) Phenylalanine/tyrosine/tryptophane
[0230] v) Leucine/isoleucine/valine/methionine
[0231] vi) Glycine/alanine

[0232] In general and in the context of this invention, a MAGE protein will be approximately 50% or more identical, such as 70, 80, 90, 95 96, 97, 98 or 99% identical, in this core region with amino acids 195 to 279 of MAGE A1.

[0233] MAGE protein derivatives are also known in the art, see: WO 99/40188. Such derivatives are suitable for use in the present invention, for example in compositions, immunogenic compositions, therapeutic vaccine formulations or immunotherapy as described herein, which are suitable for the treatment of a range of tumour types.

[0234] Several CTL epitopes have been identified on the MAGE-3 protein and may comprise or consist of an antigen of the present invention. One such epitope, MAGE-3.A1, is a nonapeptide sequence located between amino acids 168 and 176 of the MAGE-3 protein which constitutes an epitope specific for CTLs when presented in association with the MHC class I molecule HLA.A1.

[0235] In alternative embodiments of the invention, the antigen may comprise or consist of one of the following antigens, or an immunogenic portion thereof which is able to direct an immune response to the antigen: SSX-2; SSX-4; SSX-5; NA17; MELAN-A; Tyrosinase; LAGE-1; NY-ESO-1; PRAME; P790; P510; P835; B305D; B854; CASB618 (as described in WO00/53748); CASB7439 (HASH-2, also described in WO01/62778); C1491; C1584; and C1585.

[0236] In one embodiment, the antigen may comprise or consist of P501S (also known as protein). The P501S antigen may be a recombinant protein that combines most of the P501S protein with a bacterial fusion protein comprising the C terminal part of protein LytA of Streptococcus pneumoniae in which the P2 universal T helper peptide of tetanus toxoid has been inserted, ie. a fusion comprising CLytA-P2-CLyta (the “CPC” fusion partner), as described in WO03/104272;

[0237] In one embodiment, the antigen may comprise or consist of WT-1 expressed by the Wilm's tumor gene, or its N-terminal fragment WT-1F comprising about or approximately amino acids 1-249; the antigen expressed by the Her-2/neu gene, or a fragment thereof.

[0238] In one embodiment, the Her-2/neu antigen may be one of the following fusion proteins which are described in WO00/44899.

[0239] In a further embodiment, the antigen may comprise or consist of “HER-2/neu ECD-ICD fusion protein,” also referred to as “ECD-ICD” or “ECD-ICD fusion protein,” which refers to a fusion protein (or fragments thereof) comprising the extracellular domain (or fragments thereof) and the intracellular domain (or fragments thereof) of the HER-2/neu protein. In one embodiment, this ECD-ICD fusion protein does not include a substantial portion of the HER-2/neu transmembrane domain, or does not include any of the HER-2/neu transmembrane domain.

[0240] In a further embodiment, the antigen may comprise or consist of “HER-2/neu ECD-PD fusion protein,” also referred to as “ECD-PD” or “ECD-PD fusion protein,” or the “HER-2/neu ECD-ΔPD fusion protein,” also referred to as “ECD-ΔPD” or “ECD-ΔPD fusion protein,” which refers to fusion proteins (or fragments thereof) comprising the extracellular domain (or fragments thereof) and phosphorylation domain (or fragments thereof, e.g., ΔPD) of the HER-2/neu protein. In one embodiment, the ECD-PD and ECD-ΔPD fusion proteins do not include a substantial portion of the HER-2/neu transmembrane domain, or does not include any of the HER-2/neu transmembrane domain.

[0241] In one embodiment, the antigen as described herein may be linked to an immunological fusion or expression enhancer partner. Fusion proteins may include a hybrid protein comprising two or more antigens relevant to a given disease or may be a hybrid of an antigen and an expression enhancer partner.

[0242] The antigen and partner may be chemically conjugated, or may be expressed as a recombinant fusion protein. In one embodiment the antigen and partner are expressed as a recombinant fusion protein. The fusion partner may assist in providing T helper epitopes (immunological fusion partner) and/or assist in expressing the protein at higher yields than the native recombinant protein (expression enhancer). In one embodiment, the fusion partner may be both an immunological fusion partner and expression enhancing partner.

[0243] In one embodiment of the invention, the immunological fusion partner that may be used is derived from protein D, a surface protein of the gram-negative bacterium, Haemophilus influenza B (WO 91/18926) or a derivative thereof. Thus, fusion partner proteins for use in the present invention may, for example, be derived from protein D. Protein D is a lipoprotein (a 42 kDa immunoglobulin D binding protein exposed on the surface of the Gram-negative bacterium Haemophilus influenzae). The protein is synthesized as a precursor with an 18 amino acid residue signal sequence, containing a consensus sequence for bacterial lipoprotein (WO 91/18926). Native precursor Protein D protein is processed during secretion and the signal sequence is cleaved. The Cys of the processed Protein D (at position 19 in the precursor molecule) becomes the N terminal residue of the processed protein and is concomitantly modified by covalent attachment of both ester-linked and amide-linked fatty acids. The fatty acids linked to the amino-terminal Cysteine residue then function as membrane anchor.

[0244] In one embodiment, the tumour associated antigen or derivative for use in the present invention may comprise Protein D or a derivative thereof as a fusion partner protein.

[0245] The protein D or a derivative thereof as described herein may comprise, for example: the first or N-terminal third of processed protein D or approximately or about the first or N-terminal third of processed protein D. In one embodiment, the protein D or a derivative thereof may comprise the first or N-terminal 100 to 115 amino acids of processed protein D; or the first or N-terminal 109 amino acids of processed protein D. In one embodiment, the native processed Protein D amino acids 2-Lys and 2-Leu may be substituted with amino acids 2-Asp and 3-Pro.

[0246] In one embodiment, it may comprise the first N-terminal 100-110 amino acids or approximately the first N-terminal 100-110 amino acids. In one embodiment the fusion protein comprises the first 109 residues (or 108 residues therefrom) or amino acids 20 to 127 of protein D.

[0247] In one embodiment, the protein D or derivative thereof may further include the 18 or 19 amino acid signal sequence of precursor protein D. In one embodiment, the fusion partner protein derived from protein D comprises or consists of amino acids 20 to 127 of precursor protein D. In one embodiment of the present invention, the two amino acids 21-Lys and 22-Leu of the precursor protein D fusion partner protein may be substituted with amino acids 21-Asp and 22-Pro.

[0248] The protein D fusion partner protein as described herein may additionally or alternatively contain deletions, substitutions or insertions within the amino acid sequence when compared to the wild-type precursor or processed protein D sequence. In one embodiment, 1, 2, 3, 4, 5, 6, 7, 8, 9 or more amino acids may be inserted, substituted or deleted. The amino acids may be substituted with conservative substitutions as defined herein, or other amino acids may be used.

[0249] In one embodiment, the fusion partner protein may comprise or consist of the protein shown in SEQ ID NO: 6092 (FIG. 12). In one embodiment, the fusion partner protein may comprise or consist of the amino acids underlined in FIG. 12.

[0250] Other fusion partners that may be used include the non-structural protein from influenzae virus, NS1 (hemagglutinin). Typically the N terminal 81 amino acids of NS1 may be utilised, although different fragments may be used provided they include T-helper epitopes.

[0251] In another embodiment the fusion partner protein for use in the present invention is LytA, for example C-LytA. LytA is derived from Streptococcus pneumoniae which synthesise an N-acetyl-L-alanine amidase, amidase LytA, (coded by the LytA gene (Gene, 43 (1986) page 265-272) an autolysin that specifically degrades certain bonds in the peptidoglycan backbone. The C-terminal domain of the LytA protein (C-LytA or CLytA) is responsible for the affinity to the choline or to some choline analogues such as DEAE. This property has been exploited for the development of E. coli C-LytA expressing plasmids useful for expression of fusion proteins. Purification of hybrid proteins containing the C-LytA fragment at its amino terminus has been described (Biotechnology: 10, (1992) page 795-798). In one embodiment, the C terminal portion of the molecule may be used. The embodiment may utilise the repeat portion of the LytA molecule found in the C terminal end starting at residue 178. In one embodiment, the LytA portion may incorporate residues 188-305.

[0252] In one embodiment of the present invention, the MAGE protein may comprise a derivatised free thiol. Such antigens have been described in WO 99/40188. In particular carboxyamidated or carboxymethylated derivatives may be used.

[0253] In one embodiment of the present invention, the tumour associated antigen comprises protein D-MAGE-A3 as a fusion protein. The nucleotide and amino acid sequences for this molecule are shown in FIG. 11 and SEQ ID NO:6093. This antigen is described in more detail in WO 99/40188.

[0254] In further embodiments of the present invention, the tumour associated antigen may comprise any of the following fusion proteins: a fusion protein of Lipoprotein D fragment, MAGE1 fragment, and histidine tail; fusion protein of NS1-MAGE3, and Histidine tail; fusion protein of CLYTA-MAGE1-Histidine; fusion protein of CLYTA-MAGE3-Histidine.

[0255] In further embodiments of the present invention, the tumour associated antigen may comprise a fusion protein as described herein.

[0256] In a further embodiment of the present invention, the composition or immunogenic composition may comprise a nucleic acid molecule encoding an antigen or derivative as described herein, for example a nucleic acid-based vaccine or immunogenic composition may be used. This may comprise a nucleic acid molecule encoding an antigen or fusion protein as described herein. Nucleic acid sequences may be administered directly, as part of particle-mediated delivery (PMED), and/or may be inserted into a suitable expression vector and used for DNA/RNA vaccination. Such sequences may be inserted into a suitable expression vector and used for DNA/RNA vaccination. Microbial vectors expressing the nucleic acid may also be used as vectored delivered immunotherapeutics. Such vectors include for example, poxvirus, adenovirus, alphavirus and listeria.

[0257] Conventional recombinant techniques for obtaining nucleic acid sequences, and production of expression vectors of are described in Maniatis et al., Molecular Cloning—A Laboratory Manual; Cold Spring Harbor, 1982-1989.

[0258] Compositions, vaccines, immunotherapeutic agents or components thereof as described herein for use in the present invention, for example protein components, are provided either in a liquid form or in a lyophilised form.

[0259] Each human dose may comprise 1 to 1000 μg of protein, for example 30-300 μg such as 25, 30, 40, 50, 60, 70, 80 or 90 μg.

[0260] The compositions, immunogenic compositions, vaccines or immunotherapeutic agents or methods described herein may further comprise an adjuvant, and/or an immunostimulatory cytokine or chemokine.

[0261] Adjuvants that may be used in the present invention include Merck Adjuvant 65 (Merck and Company, Inc., Rahway, N.J.); aluminium salts such as aluminium hydroxide gel (alum) or aluminium phosphate; salts of calcium, iron or zinc; an insoluble suspension of acylated tyrosine; acylated sugars; cationically or anionically derivatised polysaccharides; polyphosphazenes; biodegradable microspheres; monophosphoryl lipid A and quil A. Cytokines, such as GM-CSF or interleukin-2, -7, or -12, and chemokines may also be used as adjuvants.

[0262] In one embodiment, the adjuvants may include, for example, a combination of monophosphoryl lipid A, such as 3-de-O-acylated monophosphoryl lipid A (3D-MPL) together with an aluminium salt.

[0263] In place of 3D-MPL, other toll like receptor 4 (TLR4) ligands such as aminoalkyl glucosaminide phosphates (WO 98/50399, WO 01/34617 and WO 03/065806) may be used.

[0264] In one embodiment, the adjuvant may include a TLR9 agonist such as an immunostimulatory oligonucleotide comprising unmethylated CpG, for example:

SEQ ID NO: 6102

TCC ATG ACG TTC CTG ACG TT (CpG 1826)

SEQ ID NO: 6103

TCT CCC AGC GTG CGC CAT (CpG 1758)

SEQ ID NO: 6104

ACC GAT GAC GTC GCC GGT GAC GGC ACC ACG

SEQ ID NO: 6105

TCG TCG TTT TGT CGT TTT GTC GTT (CpG 2006, CpG
7909)

SEQ ID NO: 6106

TCC ATG ACG TTC CTG ATG CT (CpG 1668)

[0265] In one embodiment of the present invention, the adjuvant comprises the combination of a CpG-containing oligonucleotide and a saponin derivative, for example the combination of CpG and QS21 (WO 00/09159 and WO 00/62800).

[0266] The adjuvant formulation may additionally comprise an oil in water emulsion and/or tocopherol.

[0267] In one embodiment, the adjuvant comprises a saponin, for example QS21 (Aquila Biopharmaceuticals Inc., Framingham, Mass.), that may be used alone or in combination with other adjuvants. In one embodiment, the adjuvant comprises the combination of a monophosphoryl lipid A and saponin derivative, such as the combination of QS21 and 3D-MPL (WO 94/00153), or a composition where the QS21 is quenched with cholesterol (WO 96/33739).

[0268] In one embodiment, the adjuvant components are provided in an oil-in-water emulsion and tocopherol. In one embodiment, the adjuvant formulation comprises QS21, 3D-MPL and tocopherol in an oil-in-water emulsion (WO 95/17210).

[0269] In another embodiment, the adjuvants may be formulated in a liposomal composition.

[0270] In an embodiment, the adjuvant system comprises a CpG oligonucleotide, 3D-MPL and QS21 either presented in a liposomal formulation or an oil in water emulsion (WO 95/17210).

[0271] The amount of CpG or immunostimulatory oligonucleotides in the adjuvants or immunotherapeutics of the present invention is generally small, but depending on the immunotherapeutic formulation may be in the region of 1-1000 μg per dose, for example 1-500 μg per dose.

[0272] The amount of saponin for use in the adjuvants of the present invention may be in the region of 1-1000 μg per dose, for example 1-500 μg per dose, such as 1 to 100 μg per dose, particularly 25, 30, 40, 50, 60, 70, 80 or 90 μg per dose.

[0273] Generally, it is expected that each human dose will comprise 0.1-1000 μg of antigen, preferably 0.1-500 μg, preferably 0.1-100 μg, most preferably 0.1 to 50 μg. An optimal amount can be ascertained by standard studies.

[0274] Following initial administration or vaccination, subjects may receive one or several booster administrations or immunisations adequately spaced.

[0275] Other adjuvants that may be used include Montanide ISA 720 (Seppic, France), SAF (Chiron, Calif., United States), ISCOMS (CSL), MF-59 (Chiron), Ribi Detox, R^{C}-529 and other aminoalkyl glucosaminide 4-phosphates (AGPs) (GSK, Hamilton, Mont.).

[0276] In one embodiment, the adjuvant may comprise one or more of 3D-MPL, QS21 and an immunostimulatory CpG oligonucleotide. In an embodiment all three immunostimulants are present. In another embodiment 3D-MPL and QS21 are presented in an oil in water emulsion, and in the absence of a CpG oligonucleotide.

[0277] A composition for use in the method of the present invention may comprise a pharmaceutical composition comprising tumour associated antigen as described herein, or a fusion protein, in a pharmaceutically acceptable excipient.

[0278] In a further aspect the invention provides a method of treating a responder patient with an appropriate therapy, for example immunotherapy, for example cancer immunotherapy such as cancer testis immunotherapy, after identification of the same as a responder thereto.

[0279] Thus, the invention provides a method of treating a patient comprising the step of administering a therapeutically effective amount of a therapy, for example immunotherapy as described herein, for example cancer immunotherapy, such as MAGE antigen specific immunotherapy, after first characterising the patient as a responder based on differential expression of at least one immune activation gene, for example as shown by appropriate analysis of a sample derived from the patient. In particular wherein the patient is characterised as a responder based on one or more embodiments described herein.

[0280] In one aspect the immunotherapy comprises an appropriate adjuvant, as described herein.

[0281] In yet a further embodiment of the invention there is provided a method of treating a patient suffering from, for example, a MAGE expressing tumour, the method comprising determining whether the patient expresses the gene signature of the invention and then administering, for example, a therapy as described herein, for example MAGE specific immunotherapy. In a further embodiment, the patient is treated with, for example, the MAGE specific immunotherapy to prevent or ameliorate recurrence of disease, after first receiving treatment such as resection by surgery of any tumour or other chemotherapeutic or radiotherapy treatment.

[0282] A further aspect of the invention is a method of treating a patient suffering from a MAGE expressing tumour, the method comprising determining whether the patient's tumour expresses a profile according to any embodiment of the invention from a biological sample given by a patient and then administering a MAGE specific immunotherapeutic to said patient.

[0283] Also provided is a method of treating a patient susceptible to recurrence of MAGE expressing tumour having been treated to remove/treat a MAGE expressing tumour, the method comprising determining whether the patient's tumour expresses one or more genes selected from any embodiment of the invention from a biological sample given by a patient and then administering a MAGE specific immunotherapeutic.

[0284] In one embodiment, the invention also provides a method of treatment or use employing, comprising or consisting of:
[0285] a MAGE specific immunotherapeutic comprising a MAGE antigen or peptide thereof,
[0286] a MAGE antigen comprising a MAGE-A3 protein or peptide as described herein,
[0287] a MAGE antigen comprising the peptide EVDPIGHLY or other epitopes as described herein,
[0288] a MAGE antigen or peptide fused or conjugated to a carrier protein, for example in which the carrier protein is selected from protein D, NS1 or CLytA or fragments thereof as described herein, and/or
[0289] a MAGE specific immunotherapeutic further comprising an adjuvant, for example in which the adjuvant comprises one or more or combinations of: 3D-MPL; aluminium salts; CpG containing oligonucleotides; saponin-containing adjuvants such as QS21 or ISCOMs; oil-in-water emulsions; and liposomes.

[0290] The invention also extends to use of an immunotherapy such as a cancer immunotherapy, in particular MAGE immunotherapy in the manufacture of a medicament for the treatment of a patient such as a cancer patient designated as a responder, thereto.

[0291] The inventors believe that it may be possible to induce a responders profile in at least some non-responders, for example by subjecting the patient to radiation therapy, or administering an inflammatory stimulant such as interferon or a TLR 3 (for example as described in WO 2006/054177), 4, 7, 8 or TLR 9 agonist (for example containing a CpG motif, in particular administering a high dose thereof such as 0.1 to 75 mg per Kg adminstered, for example weekly).

[0292] The high dose of CpG may, for example be inhaled or given subcutaneously.

[0293] The invention further provides the use of MAGE specific immunotherapy in the manufacture of a medicament for the treatment of patients suffering from MAGE expressing tumour or patients who have received treatment (e.g. surgery, chemotherapy or radiotherapy) to remove/treat a MAGE expressing tumour, said patient expressing the gene signature of the invention.

[0294] The immunotherapy may then be administered to for example responders or once the responders profile has been induced.

[0295] In one aspect the invention provides use of MAGE specific immunotherapy in the manufacture of a medicament for the treatment of patients suffering from a MAGE expressing tumour, said patient characterised by their tumour expressing one or more genes selected from any embodiment of the invention.

[0296] The invention also provides use of MAGE specific immunotherapy in the manufacture of a medicament for the treatment of patients susceptible to recurrence from MAGE expressing tumour said patient characterised by their tumour one or more genes selected from any embodiments of the invention.

[0297] Advantageously, the invention may allow treatment providers to target those populations of patients that will obtain a clinical benefit from receiving an appropriate immunotherapy. It is expected that after screening that at least 60% of patients such as 70, 75, 80, 85% or more of patients deemed/characterised as responders will receive a clinical benefit from the immunotherapy, which is a significant increase over the current levels observed with therapy such as cancer therapy generally.

[0298] Advantageously if the cancer immunotherapy is given concomitantly or subsequent to chemotherapy it may assist in raising the patient's immune responses, which may have been depleted by the chemotherapy.

[0299] In a further embodiment the immunotherapy may be given prior to surgery, chemotherapy and/or radiotherapy.

[0300] Antigen Specific Cancer Immunotherapeutics (ASCIs) suitable for use in the invention may, for example include those capable of raising a MAGE specific immune response. Such immunotherapeutics may be capable of raising an immune response to a MAGE gene product, for example a MAGE-A antigen such as MAGE-A3. The immunotherapeutic will generally contain at least one epitope from a MAGE gene product. Such an epitope may be present as a peptide antigen optionally linked covalently to a carrier and optionally in the presence of an adjuvant. Alternatively larger protein fragments may be used. For example, the immunotherapeutic for use in the invention may comprise an antigen that corresponds to or comprises amino acids 195-279 of MAGE-A1. The fragments and peptides for use must however, when suitably presented be capable of raising a MAGE specific immune response. Examples of peptides that may be used in the present invention include the MAGE-3.A1 nonapeptide EVDPIGHLY [SEQ ID NO: 6094], and the following MAGE-A3 peptides:

| | |
|---|---|
| FLWGPRALV; | SEQ ID NO: 6095 |
| MEVDPIGHLY; | SEQ ID NO: 6096 |
| VHFLLLKYRA; | SEQ ID NO: 6097 |
| LVHFLLLKYR; | SEQ ID NO: 6098 |
| LKYRAREPVT; | SEQ ID NO: 6099 |
| ACYEFLWGPRALVETS; | SEQ ID NO: 6100 |
| and | |
| TQHFVQENYLEY; | SEQ ID NO: 6101 |

[0301] Alternative ASCIs include cancer testis antigens such as PRAME, LAGE 1, LAGE 2, and others.

[0302] In one embodiment of the present invention, the antigen to be used may consist or comprise a MAGE tumour antigen, for example, MAGE 1, MAGE 2, MAGE 3, MAGE 4, MAGE 5, MAGE 6, MAGE 7, MAGE 8, MAGE 9, MAGE 10, MAGE 11 or MAGE 12. The genes encoding these MAGE antigens are located on chromosome X and share with each other 64 to 85% homology in their coding sequence (De Plaen, 1994). These antigens are sometimes known as MAGE A1, MAGE A2, MAGE A3, MAGE A4, MAGE A5, MAGE A6, MAGE A7, MAGE A8, MAGE A9, MAGE A 10, MAGE A11 and/or MAGE A12 (The MAGE A family). In one embodiment, the antigen is MAGE A3.

[0303] In one embodiment, an antigen from one of two further MAGE families may be used: the MAGE B and MAGE C group. The MAGE B family includes MAGE B1 (also known as MAGE Xp1, and DAM 10), MAGE B2 (also known as MAGE Xp2 and DAM 6) MAGE B3 and MAGE B4—the MAGE C family currently includes MAGE C1 and MAGE C2. In general terms, a MAGE protein can be defined as containing a core sequence signature located towards the C-terminal end of the protein (for example with respect to MAGE A1 a 309 amino acid protein, the core signature corresponds to amino acid 195-279).

[0304] In one embodiment the MAGE antigen may comprise the full length MAGE protein. In an alternative embodiment the MAGE antigen may comprise amino acids 3 to 312 of the MAGE antigen.

[0305] In alternative embodiments the MAGE antigen may comprise 100, 150, 200, 250 or 300 amino acids from the MAGE protein, provided that the antigen is capable of generating an immune response against MAGE, when employed in an immunotherapeutic treatment.

[0306] As far as the inventors are aware it has never been proposed to exclude gender related genes from gene profiles. Therefore in a further aspect the invention provides a method of generating a gene profile, wherein at one stage in the analysis the gender related genes are excluded.

[0307] In one aspect the gender related genes may be excluded, for example at the initial stages of the analysis by simply removing the relevant genes from the raw data.

[0308] In another aspect the gender related genes may removed from a gene list that has been generated by a statistical method, for example as described herein, by performing a multivariant analysis.

[0309] In another aspect the gender related aspects can be removed from the analysis by simply ensuring that the same number of males and females are included for each category under analysis, as appropriate.

[0310] Use of the word “comprising” in the context of this specification in intended to be non-limiting ie means “including”.

[0311] Embodiments are specifically envisaged where aspects of the invention comprising a certain element or elements are limited to said aspects consisting or consisting essentially of the relevant elements as separate embodiments.

[0312] The examples below are shown to illustrate the methodology, which may be employed to prepare particles of the invention.

[0313] Discussion of documents in this specification is intended to give context to the invention and aid understanding of the same. In no way is it intended to be an admission that the document or comment is known or is common general knowledge in the relevant field.

### EXAMPLES

### Example 1

### MAGE008 MAGE Melanoma Clinical Trial

[0314] In this on-going trial, the recMAGE-A3 protein (recombinant protein D—Mage Fusion protein) is combined with two different immunological adjuvants: either AS02B (QS21, MPL) or AS15 (QS21, MPL and CpG7909). The objectives were to discriminate between the adjuvants in terms of safety profile, clinical response and immunological response.

[0315] In this experiment two adjuvant compositions are made up of mixtures of two immunostimulants:
[0316] 1. QS21 (Purified, naturally occurring saponin molecule from the South-American tree Quillaja Saponaria Molina), and
[0317] 2. MPL (3 de-O-acetylated monophosphoryl lipid A—detoxified derivative of lipid A, derived from S. minnesota LPS).
   AS02B is an oil-in-water emulsion of QS21 and MPL.

[0318] In animal models these adjuvants have been successfully shown to induce both humoral and TH 1 types of cellular-mediated immune responses, including CD4 and CD8 T-cells producing IFNα (Moore et al., 1999; Gérard et al., 2001). Moreover, the injection of recombinant protein formulated in this type of adjuvant leads to the induction of a systemic anti-tumour response: indeed, vaccinated animals were shown to be protected against challenges with murine tumour cells genetically engineered to express the tumour antigen, and regressing tumours were shown to be highly infiltrated by CD8, CD4 and NK cells and by macrophages.

[0319] The second adjuvant system is AS15: it contains a third immunostimulant, namely CpG7909 (otherwise known as CpG 2006 supra), in addition to MPL and QS21, in a liposome formulation.

### Study Overview

[0320] 1. Design
   The MAGE008 trial is:
[0321] open
[0322] randomized
[0323] two-arm (AS02B vs. AS15)
[0324] with 68 patients in total.

[0325] As described above, the recMAGE-A3 protein is combined with either AS02B or AS15 adjuvant system.
[0326] 2. Patient population

[0327] The recMAGE-A3 protein is administered to patients with progressive metastatic melanoma with regional or distant skin and/or lymph-node lesions (unresectable stage III and stage IV M1a). The expression of the MAGE-A3 gene by the tumour was assessed by quantitative PCR. The selected patients did not receive previous treatment for melanoma (recMAGE-A3 is given as first-line treatment) and had no visceral disease.
[0328] 3. Schedule of immunization

### Method of Treatment Schedules

### Adjuvant Setting

[0329] The method of treatment schedule for use in disease in an adjuvant (post-operative) setting may comprise administration of an antigen as described herein according to the following schedules:

[0330] Administration of antigen at three week intervals for the first 5 to 8 vaccinations, followed at 3 month intervals for the next 8, 9 or more vaccinations.

[0331] The antigen may be administered at the exact time frame indicated, or the antigen may be given 1, 2, 3 or 4 days before or after the exact interval, as required or as practical. An example of this schedule is shown in the table below:
[0332] Induction: 5 vaccinations at intervals of 3 weeks for example Weeks 0, 3, 6, 9, 12 or Weeks 0, 6, 9, 12
[0333] Maintenance: 9 vaccinations at intervals of 3 months
   Alternatively, the vaccinations may be given initially at 2 week intervals, for example 6 injections at two week intervals followed by appropriate maintenance therapy.

### Active Disease

[0334] The method of treatment schedule for use in active or unresectable disease, for example in melanoma cancer, comprising: administration of an antigen as described herein at two or three week intervals for the first six months to one year of treatment. A schedule may comprise the following pattern of injections: the antigen may be given at two week intervals for the first 4 to 10 vaccinations, followed by 3 week intervals for the next 4 to 10 vaccinations, then at 6 week intervals for the next 3 to 7 vaccinations. Long term treatment may then continue with vaccinations at 3 month intervals for 3 to 5 vaccinations, followed by 6 month intervals for the next 3 to 5 vaccinations.

[0335] The antigen may be administered at the exact time frame indicated, or the antigen may be given 1, 2, 3 or 4 days before or after the exact interval, as required or as practical. An example of this schedule is shown in the table below:
[0336] Cycle 1: 6 vaccinations at intervals of 2 weeks (Weeks 1, 3, 5, 7, 9, 11)
[0337] Cycle 2: 6 vaccinations at intervals of 3 weeks (Weeks 14 or 15, 17 or 18, or 21, 23 or 24, 26 or 27, 29 or 30)
[0338] Cycle 3: 4 vaccinations at intervals of 6 weeks (Weeks 33 or 34, 39 or 40, 45 or 46, 51 or 52)
[0339] Long Term Treatment: 4 vaccinations at intervals of 3 months, for example followed by 4 vaccinations at intervals of 6 months

[0340] For both of the above treatment regimes additional vaccinations may be given after treatment, as required.

[0341] In order to screen potential participants in the above clinical trial tumour biopsies were received (both prior to any immunization and after immunization, if applicable, as relapses), as frozen tumour samples. Nevertheless relapse samples and samples for individuals who did not complete the first cycle of treatment were not included in the analysis to generate the genes list of the invention including in the examples, unless stated otherwise). From these samples RNA was extracted for quantitative PCR. The quality of this purified RNA was extremely high and it was suitable for microarray analysis. Tumour samples were therefore analyzed by microarray. The goal was to identify in pre-vaccination biopsies a set of genes associated with the clinical response and to develop a mathematical model that would predict patient clinical outcome, so that patients likely to benefit from this antigen-specific cancer immunotherapeutic are properly identified and selected. Gene profiling was performed only on biopsies from patients who signed the informed consent for microarray analysis.

### Materials and Methods

### Tumour Specimens

[0342] 96 tumour specimens (both pre-vaccination and after vaccination types) were used from the MAGE008 MAGE-3 melanoma clinical trial. These were fresh frozen preserved in the RNA stabilizing solution RNAlater.

### RNA Purification

[0343] Tumoural total RNA was purified using the Tripure method—Tripure extraction (Roche Cat. No. 1 667 165). The protocols provided were followed subsequently by the use of an RNeasy Mini kit—clean-up protocol with DNAse treatment (Qiagen Cat. No. 74106).

### RNA Quality Control

[0344] Quantification of RNA was initially completed using optical density at 260 nm and Quant-IT RiboGreen RNA assay kit (Invitrogen—Molecular probes R11490). The quality of the 28s and 18s ribosomal RNA peaks was assessed by use of the Agilent bioanalyser.

### RNA Labeling and Amplification for Microarray Analysis

[0345] Due to the small biopsy size received during the clinical study, an amplification method was used in conjunction with the labelling of the RNA for microarray analysis, the Nugen 3′ ovation biotin kit (Labelling of 50 ng of RNA—Ovation biotin system Cat; 2300-12, 2300-60). A starting input of 50 ng of total RNA was used.

### Microarray Chips

[0346] The Affymetrix HU-U133.Plus 2.0 gene chips were utilized. These chips cover about 47,000 potential gene transcripts.

### Microarray Hybridization and Scanning

[0347] The hybridized chips were washed and scanned according to the standard Affymetrix protocols.

### Data Analysis:

[0348] All calculations were run under R 2.4.0 program (R Development Core Team (2006). R: A language and environment for statistical computing. R Foundation for Statistical Computing, Vienna, Austria. ISBN 3-900051-07-0.

### Data Processing & Normalization

[0349] The fluorescent scanned data were then normalized using GCRMA using all 96 patient sample data to allow comparisons between individual chips. The following references describe this method: Jean (ZHIJIN) Wu and Rafael Irizarry with contributions from James MacDonald Jeff Gentry (2005). GCRMA: Background Adjustment Using Sequence Information. R package version 2.4.1.; Wu Z, Irizarry R A, Gentleman R, Martinez-Murillo F, Spencer F: A model-based background adjustment for oligonucleotide expression arrays. Journal of the American Statistical Association 2004, 99:909-917.

### Patient Sample Stratification

[0350] Two data sets were used for the selection of the set of genes correlating with clinical response and the subsequent predictive model developments:
[0351] Data related to patients having received the AS15 adjuvant, and not AS02B. 23 individual patient data fall under this category, 7 of them are responding to the antigen specific immunotherapeutic (ASCI), and the remaining 16 are not responding to the ASCI.
[0352] Data related to patients having received the AS15 adjuvant and data related to patients having received the AS02B adjuvant and responding to the ASCI treatment. Four Responder individual data are added in this stratification, bringing the total number of available patients for model development to 27. Among them, 11 Responders and 16 Non-Responders. This second stratification has this advantage over the first one to have a higher sample size and more balanced experimental groups.

[0353] Moreover, three categories of clinical response exist: objective response, stable disease, and mixed response. Only the first two categories are taken into account for these data stratification, as being internationally recognized. The mixed response category of patients, for which some melanoma lesion will regress while other will keep on progressing, as being heterogeneous, is not taken into account. Mixed Responders are kept away form the data stratifications.

### Calculation of Differential Expression

[0354] To identify in pre-vaccination biopsies a set of genes that is associated with the clinical response, differential expression between patients responding to ASCI and patients not responding to ASCI was calculated using the Signal-To-Noise statistics (S2N): for each microarray probe set, difference in experimental group mean is divided by the sum of experimental group standard deviations (SD). Values are then transformed as absolute values.

### Gene Profile Normalization

[0355] To make the probe sets having low and high levels of expression comparable and to put an emphasis on differential profiles rather than absolute profiles, data was further normalized at the probe set level. Z-score normalization was used, where each probe set measure is subtracted by its mean over samples and divided by its SD.

### Example 2

### Predictive Model

[0356] The kNN machine learning algorithm (or predictive rule), knn function, interfaced in class package (Venables, W. N. & Ripley, B. D. (2002) Modern Applied Statistics with S. Fourth Edition. Springer, N.Y. ISBN 0-387-95457-0) was used to train clinical outcome predictive models and to predict the MAGE008 patient clinical outcomes, under reporter lists calculated by the differential expression and gene normalization processes. A value of 5 was used for k parameter.

[0357] Several feature list sizes were employed to develop the predictive model. Feature lists of 2, 4, 6, 8, 10, 12, 14, 16, 18, 20, 22, 26, 30, 40, 50, 65, 80, 100, 120, 140, 160, 180, 200, 250, 300, 400, 500, 750, 1000, 2000, 4000, 8000 and 16000 probe sets were worked out. The feature lists were obtained by taking the above mentioned number of probe sets in the probe set matrix ranked in descending order according to their S2N value.

[0358] A Leave-one-out (LOO) scheme was used for cross-validation of all feature list size classifiers, with re-calculation of reporter list at each cross-validation loop, to evaluate the predictive model performance.

[0359] Sensitivity (Se) and Positive Predictive Value (PPV) were used as performance indicators. Se is defined as the proportion of true positives (TP) among Responders, and PPV is defined as the proportion of true positives (TP) among patients predicted as Responders. Se and PPV measures are preferred as model performance indicators since
[0360] Se is relative to the responding patients prediction accuracy, the highest accuracy is searched for in this model;
[0361] PPV is relative to the vaccine efficacy in the predicted population of responding patients, the highest vaccine efficacy in this population is searched for, given the highest accuracy in predicting responding patients.

[0362] The final predictive model is the feature list size classifier showing the highest Se combined to the highest PPV under the shortest feature list.

### Results

[0363] Predictive Model and Associated Gene List Correlating with Treatment Clinical OUTCOME Based on AS15 only Patients.

[0364] FIG. 1 illustrates the predictive model development results under the first stratification of patient data (AS15 receiving patients only). 18 genes (probe sets) are sufficient to predict the clinical outcome of patients at best 86% Sensitivity and 86% Positive Predictive Value, as estimated by cross-validation and under a kNN predictive rule. In other words, 18 genes can correctly predict 86% of Responders (6 Responders out of 7) and the anticipated vaccine treatment efficacy under this predictive model for selection of patients is anticipated to be 86%. Selecting the patients under this model nearly triples the asci efficacy (to compare to efficacy without patient selection, 7 dived by 23-30%).

[0365] The 18 probe sets, and associated gene names, necessary for this model prediction is given in table 1.

Implementaion of the 18-probe set predictive model, predicting the clinical response of further patient samples:

[0366] The following R code chunk in a R 2.4.0 session predicts the clinical response of further samples.

library(class)
knn(t(train), t(test), k=5)
where
[0367] train is an object (class matrix) of 18 rows and 23 columns to be built from Appendix A table (FIG. 9)
[0368] test is an object of class matrix containing the 18 feature probe sets of table 1 as rows and expression data (GCRMA processed and Z-score normalized) of the further samples to predict as columns.

[0369] Probe set order of test has to be identical to train, and Z-score calculation has to be computed for each gene using the medians (MeTr) and standard deviations (SdTr) depicted in the following table:

| PS | MeTr | SdTr |
|---|---|---|
| 229022_at | 7.185521739 | 0.548746246 |
| 215666_at | 3.588173913 | 2.045094144 |
| 1562031_at | 6.309826087 | 1.569395299 |
| 233976_at | 3.233869565 | 0.720041117 |
| 212776_s_at | 3.822130435 | 1.190575961 |
| 223095_at | 10.65008696 | 1.122050716 |
| 219551_at | 4.694434783 | 1.657036534 |
| 244008_at | 4.537826087 | 1.409750096 |
| 202290_at | 6.018434783 | 0.731497581 |
| 205518_s_at | 6.248304348 | 1.561050067 |
| 227927_at | 6.580826087 | 1.136688598 |
| 228128_x_at | 6.386434783 | 1.945937302 |
| 220301_at | 6.067347826 | 1.652552505 |
| 203992_s_at | 5.357173913 | 0.664253487 |
| 206618_at | 3.495478261 | 1.14941451 |
| 228812_at | 7.263391304 | 1.426009363 |
| 1563497_at | 6.098173913 | 1.537682898 |
| 212684_at | 8.69373913 | 0.880957858 |

### FIG. 1 Legend.

[0370] X-axis, number of probe sets used as features of the predictive model, in increasing order and log scale. Y-axis, 5NN predictive model performances, Se (emptycircles) and PPV (solid dots) measures. The horizontal dashed-line is the basal vaccine treatment efficacy not taking into account predictive model based patient selection. The vertical dash-line indicates the classification optimum, i.e. the smallest feature list size for which the Se is maximum associated to the maximum PPV given this highest Se.

[0371] Table 1 shows Affymetrix probe sets (18) used as 5NN model features for predictions of clinical outcome trained on first data stratification.

### Example 3

[0372] Predictive model and associated gene list correlating with treatment clinical outcome based on responding patients to one of the following treatments:

ASCI and AS15 (a liposomal formulation of MPL, QS21 and CpG), and

[0373] ASCI and AS02B (an oil in water formulation of MPL and QS21).

[0374] FIG. 2 illustrates the predictive model development results under the second stratification of patient data AS15 receiving patients and AS02B receiving patients showing a clinical response to treatment). 250 genes (probe sets) are required to predict the clinical outcome of patients at best 91% Sensitivity and 77% Positive Predictive Value (LOO cross-validation estimates). In other words, 250 genes can correctly predict 91% of Responders (10 Responders out of 11), and the anticipated vaccine treatment efficacy under this predictive model for selection of patients is anticipated to be 77%. Selecting the patients under this model nearly doubles the ASCI efficacy (to compare to efficacy without patient selection, 11 dived by 27-41%).

[0375] The 250 probe sets, and associated gene names, necessary for this model prediction is given in Table 2.

[0376] Implementation of the 250-probe set predictive model, predicting the clinical response of further patient samples:

[0377] The following R code chunk in a R 2.4.0 session predicts the clinical response of further samples.

library (class)
knn (t (train), t (test), k=5)
where
[0378] train is an object (class matrix) of 250 rows and 27 columns to be built from Appendix B table (FIG. 10)
[0379] test is an object of class matrix containing the 250 feature probe sets of table 2 as rows and expression data (GCRMA processed and Z-score normalized) of the further samples to predict as columns.

[0380] Probe set order of test has to be identical to train, and Z-score calculation has to be computed for each gene using the medians (MeTr) and standard deviations (SdTr) depicted in the table 3:

### FIG. 2 Legend.

[0381] X-axis, number of probe sets used as features of the predictive model, in increasing order and log scale. Y-axis, 5NN predictive model performances, Se (empty circles) and PPV (solid dots) measures. The horizontal dash-line is the basal vaccine treatment efficacy not taking into account predictive model based patient selection. The vertical dash-line indicates the classification optimum, i.e. the smallest feature list size for which the Se is maximum associated to the maximum PPV given this highest Se.

Table 2: Affymetrix probe sets (250) used as 5NN model features for predictions of clinical outcome trained on second data stratification.
Table 3: Median (MeTr) and standard deviation values to be used for each probe set in the Z-score gene normalization process of additional samples to predict.

### Example 4

[0382] The list of genes in Table 4 was generated from samples in the MAGE 008 clinical trial which were prepared and analyzed as above. Thirty three samples from the AS15 arm and responders only from the AS02B arm were used. The data from these samples was analyzed using the Pearson Correlation Coefficient, which identifies genes based on the strength of the correlation between gene expression and clinical outcome. Suitable methodology is described in, for example Van't Veer 2002.

[0383] The selection leads to gene list 4. There was no evidence of a gender bias in this list generated.

[0384] In order to be able to classify samples prospectively using the above gene list, one needs to know the value that each ProbeSetld has in the metagene (as described by Van't Veer 2002). The values are provided in Table 7.

### Example 5

[0385] The list of genes in Table 5 was generated from samples in the mage 008 clinical trial, which were prepared and analyzed as above. Thirty three samples from the AS15 arm and responders only from the AS02B arm were used. The data from these samples was analyzed using Baldi statistical analysis (a variation of the classical T-test).

[0386] Multivariate analysis (Correspondance analysis) on the Baldi generated list showed clearly in FIG. 4, that gender specific genes are located in the upper-left and bottom-right quadrants. T-cell genes and other immune genes are found in the bottom-left and upper-right quadrants

[0387] New axes that correlate with the segregation of the samples and genes by gender and response can be drawn as shown in FIG. 5

[0388] The genes that are of interest for classification of the patients are those located close to the Response axis. These genes are selected by keeping the genes that are in the lower left and upper right quadrants see FIG. 6. This eliminates all the genes that are strongly correlated with gender.

[0389] The selection leads to the gene list in Table 5, Multivariate Baldi gene list

[0390] The value of each ProbeSetld in the metagene for Table 5 is provided in Table 8.

[0391] FIG. 7 shows the training set for Table 5 represented as an index. The indexing representation tool is likely to be useful for physicians because as time to treatment failure is a continuous variable and the results are with a range of very high time to treatment failure or a very lower time to treatment failure (rather than a simply binary output of responder or non-responder) then physicians can chose to treat those below the cutoff line and hence characterized as non-responder but nevertheless near to it. Thus presenting the data in this way provides the clinician with more information and allows more flexibility in the approach taken.

[0392] FIG. 8 shows the gene list of Table 5 used to predict on a small number of samples. Based on the clinical results only one patient was wrongly categorized as a responder (F106PDISKN).

### Example 6

[0393] Supervised Principal Components Analysis (SPCA) was used to analyze the samples. The main reason for using such an approach is that it allows gene to be selected by using a continuous variables of clinical outcome such as TTTF. Continuous variables are more information rich than binary variables.

[0394] The SPCA method operates in two steps:

1) A survival analysis is performed for each gene on the array. A Cox statistic is calculated for each gene. This statistic measures the strength of the association between the expression of a gene and the survival data. Genes are ranked by decreasing Cox score and the top-of-the-list genes are selected.
2) A Principal Component Analysis is performed using the genes identified in step 1. As expected, the samples will be distributed according to clinical outcome. A threshold can be set to define Responders and Non-Responders. These thresholds can be used to classify new patients (test samples).

[0395] It is expected that interference of gender with this analysis is minimal since TTTF and gender should not be correlated at the gene expression level.

[0396] The analysis yielded the list of genes in Table 6.

### Tables

TABLE 1
Affymetrix probe sets (18) used as 5NN model features for predictions of clinical
outcome trained on first data stratification.

| Probe Set ID | Symbol | Gene Name |
|---|---|---|
| 229022_at | ZFX | zinc finger protein, X-linked |
| 215666_at | HLA-DRB4 | major histocompatibility complex, class II, DR beta 4 |
| 1562031_at | JAK2 | Janus kinase 2 (a protein tyrosine kinase) |
| 233976_at | NA | NA |
| 212776_s_at | OBSL1 | obscurin-like 1 |
| 223095_at | MARVELD1 | MARVEL domain containing 1 |
| 219551_at | EAF2 | ELL associated factor 2 |
| 244008_at | NA | NA |
| 202290_at | PDAP1 | PDGFA associated protein 1 |
| 205518_s_at | CMAH | cytidine monophosphate-N-acetylneuraminic acid hydroxylase (CMP-N- |
| | | acetylneuraminate monooxygenase) |
| 227927_at | NA | NA |
| 228128_x_at | PAPPA | pregnancy-associated plasma protein A, pappalysin 1 |
| 220301_at | CCDC102B | coiled-coil domain containing 102B |
| 203992_s_at | UTX | ubiquitously transcribed tetratricopeptide repeat, X chromosome |
| 206618_at | IL18R1 | interleukin 18 receptor 1 |
| 228812_at | NA | NA |
| 1563497_at | USP25 | ubiquitin specific peptidase 25 |
| 212684_at | ZNF3 | zinc finger protein 3 |

TABLE 2
Affymetrix probe sets (250) used as 5NN model features for predictions of
clinical outcome trained on second data stratification.

| Probe Set ID | Symbol | Gene Name |
|---|---|---|
| 229022_at | ZFX | zinc finger protein, X-linked |
| 215666_at | HLA-DRB4 | major histocompatibility complex, class II, DR beta 4 |
| 1562031_at | JAK2 | Janus kinase 2 (a protein tyrosine kinase) |
| 233976_at | NA | NA |
| 212776_s_at | OBSL1 | obscurin-like 1 |
| 223095_at | MARVELD1 | MARVEL domain containing 1 |
| 219551_at | EAF2 | ELL associated factor 2 |
| 244008_at | NA | NA |
| 202290_at | PDAP1 | PDGFA associated protein 1 |
| 205518_s_at | CMAH | cytidine monophosphate-N-acetylneuraminic acid hydroxylase (CMP-N- |
| | | acetylneuraminate monooxygenase) |
| 227927_at | NA | NA |
| 228128_x_at | PAPPA | pregnancy-associated plasma protein A, pappalysin 1 |
| 220301_at | CCDC102B | coiled-coil domain containing 102B |
| 203992_s_at | UTX | ubiquitously transcribed tetratricopeptide repeat, X chromosome |
| 206618_at | IL18R1 | interleukin 18 receptor 1 |
| 228812_at | NA | NA |
| 1563497_at | USP25 | ubiquitin specific peptidase 25 |
| 212684_at | ZNF3 | zinc finger protein 3 |
| 224590_at | XIST | X (inactive)-specific transcript |
| 201364_s_at | OAZ2 | ornithine decarboxylase antizyme 2 |
| 229094_at | LOC401431 | hypothetical gene LOC401431 |
| 238106_at | COBLL1 | COBL-like 1 |
| 218553_s_at | KCTD15 | potassium channel tetramerisation domain containing 15 |
| 225150_s_at | RTKN | rhotekin |
| 205841_at | JAK2 | Janus kinase 2 (a protein tyrosine kinase) |
| 229598_at | COBLL1 | COBL-like 1 |
| 224941_at | PAPPA | pregnancy-associated plasma protein A, pappalysin 1 |
| 205027_s_at | MAP3K8 | mitogen-activated protein kinase kinase kinase 8 |
| 201870_at | TOMM34 | translocase of outer mitochondrial membrane 34 |
| 221905_at | CYLD | cylindromatosis (turban tumour syndrome) |
| 228017_s_at | C20orf58 | chromosome 20 open reading frame 58 |
| 205419_at | EBI2 | Epstein-Barr virus induced gene 2 (lymphocyte-specific G protein- |
| | | coupled receptor) |
| 205001_s_at | DDX3Y | DEAD (Asp-Glu-Ala-Asp) box polypeptide 3, Y-linked |
| 226152_at | TTC7B | tetratricopeptide repeat domain 7B |
| 206700_s_at | JARID1D | jumonji, AT rich interactive domain 1D |
| 228492_at | USP9Y | ubiquitin specific peptidase 9, Y-linked (fat facets-like, Drosophila) |
| 206118_at | STAT4 | signal transducer and activator of transcription 4 |
| 201909_at | RPS4Y1 | ribosomal protein S4, Y-linked 1 |
| 204724_s_at | COL9A3 | collagen, type IX, alpha 3 |
| 244370_at | KIAA2022 | KIAA2022 |
| 204409_s_at | EIF1AY | eukaryotic translation initiation factor 1A, Y-linked |
| 219901_at | FGD6 | FYVE, RhoGEF and PH domain containing 6 |
| 230760_at | ZFY | zinc finger protein, Y-linked |
| 205000_at | DDX3Y | DEAD (Asp-Glu-Ala-Asp) box polypeptide 3, Y-linked |
| 226854_at | GTPBP5 | GTP binding protein 5 (putative) |
| 232618_at | CYorf15A | chromosome Y open reading frame 15A |
| 231229_at | HILS1 | histone linker H1 domain, spermatid-specific 1 |
| 227073_at | MAP3K2 | mitogen-activated protein kinase kinase kinase 2 |
| 205447_s_at | MAP3K12 | mitogen-activated protein kinase kinase kinase 12 |
| 223646_s_at | CYorf15B | chromosome Y open reading frame 15B |
| 218838_s_at | TTC31 | tetratricopeptide repeat domain 31 |
| 206637_at | P2RY14 | purinergic receptor P2Y, G-protein coupled, 14 |
| 204410_at | EIF1AY | eukaryotic translation initiation factor 1A, Y-linked |
| 39582_at | CYLD | cylindromatosis (turban tumour syndrome) |
| 210258_at | RGS13 | regulator of G-protein signaling 13 |
| 212801_at | CIT | citron (rho-interacting, serine/threonine kinase 21) |
| 242469_at | LOC120376 | hypothetical protein LOC120376 |
| 227119_at | CNOT6L | CCR4-NOT transcription complex, subunit 6-like |
| 239486_at | NA | NA |
| 222778_s_at | WHSC1 | Wolf-Hirschhorn syndrome candidate 1 |
| 239146_at | CLDND1 | claudin domain containing 1 |
| 229308_at | NA | NA |
| 216540_at | TRA@ | T cell receptor alpha locus |
| 202580_x_at | FOXM1 | forkhead box M1 |
| 230164_at | ZNF621 | zinc finger protein 621 |
| 203756_at | ARHGEF17 | Rho guanine nucleotide exchange factor (GEF) 17 |
| 227265_at | FGL2 | fibrinogen-like 2 |
| 226207_at | FLJ39378 | hypothetical protein FLJ39378 |
| 212877_at | KLC1 | kinesin light chain 1 |
| 211603_s_at | ETV4 | ets variant gene 4 (E1A enhancer binding protein, E1AF) |
| 213295_at | CYLD | cylindromatosis (turban tumour syndrome) |
| 223645_s_at | CYorf15B | chromosome Y open reading frame 15B |
| 235092_at | KCTD1 | potassium channel tetramerisation domain containing 1 |
| 224940_s_at | PAPPA | pregnancy-associated plasma protein A, pappalysin 1 |
| 223407_at | C16orf48 | chromosome 16 open reading frame 48 |
| 211149_at | UTY | ubiquitously transcribed tetratricopeptide repeat gene, Y-linked |
| 1561226_at | NA | NA |
| 243010_at | MSI2 | musashi homolog 2 (Drosophila) |
| 225882_at | SLC35B4 | solute carrier family 35, member B4 |
| 230968_at | NA | NA |
| 216958_s_at | IVD | isovaleryl Coenzyme A dehydrogenase |
| 226972_s_at | CCDC136 | coiled-coil domain containing 136 |
| 244393_x_at | AKR1C2 | aldo-keto reductase family 1, member C2 (dihydrodiol dehydrogenase 2; |
| | | bile acid binding protein; 3-alpha hydroxysteroid dehydrogenase, type III) |
| 219844_at | C10orf118 | chromosome 10 open reading frame 118 |
| 222859_s_at | DAPP1 | dual adaptor of phosphotyrosine and 3-phosphoinositides |
| 214131_at | CYorf15B | chromosome Y open reading frame 15B |
| 205105_at | MAN2A1 | mannosidase, alpha, class 2A, member 1 |
| 204434_at | SPATA2 | spermatogenesis associated 2 |
| 227263_at | C8orf58 | chromosome 8 open reading frame 58 |
| 228071_at | GIMAP7 | GTPase, IMAP family member 7 |
| 217778_at | SLC39A1 | solute carrier family 39 (zinc transporter), member 1 |
| 202948_at | IL1R1 | interleukin 1 receptor, type I |
| 1554999_at | RASGEF1B | RasGEF domain family, member 1B |
| 201115_at | POLD2 | polymerase (DNA directed), delta 2, regulatory subunit 50 kDa |
| 204947_at | E2F1 | E2F transcription factor 1 |
| 244272_s_at | TC2N | tandem C2 domains, nuclear |
| 239834_at | KCTD1 | potassium channel tetramerisation domain containing 1 |
| 213618_at | CENTD1 | centaurin, delta 1 |
| 213547_at | CAND2 | cullin-associated and neddylation-dissociated 2 (putative) |
| 210052_s_at | TPX2 | TPX2, microtubule-associated, homolog (Xenopus laevis) |
| 207063_at | CYorf14 | chromosome Y open reading frame 14 |
| 210976_s_at | PFKM | phosphofructokinase, muscle |
| 221759_at | G6PC3 | glucose 6 phosphatase, catalytic, 3 |
| 231715_s_at | PYCR2 | pyrroline-5-carboxylate reductase family, member 2 |
| 235310_at | GCET2 | germinal center expressed transcript 2 |
| 1568752_s_at | RGS13 | regulator of G-protein signaling 13 |
| 201087_at | PXN | paxillin |
| 226043_at | GPSM1 | G-protein signaling modulator 1 (AGS3-like, C. elegans) |
| 212775_at | OBSL1 | obscurin-like 1 |
| 209262_s_at | NR2F6 | nuclear receptor subfamily 2, group F, member 6 |
| 212654_at | TPM2 | tropomyosin 2 (beta) |
| 210017_at | MALT1 | mucosa associated lymphoid tissue lymphoma translocation gene 1 |
| 231094_s_at | MTHFD1L | methylenetetrahydrofolate dehydrogenase (NADP+ dependent) 1-like |
| 229623_at | FLJ12993 | hypothetical LOC441027 |
| 229575_at | NA | NA |
| 216438_s_at | TMSB4X | thymosin, beta 4, X-linked |
| 209728_at | HLA-DRB4 | major histocompatibility complex, class II, DR beta 4 |
| 205204_at | NMB | neuromedin B |
| 227908_at | TBC1D24 | TBC1 domain family, member 24 |
| 235885_at | P2RY12 | purinergic receptor P2Y, G-protein coupled, 12 |
| 213569_at | NA | NA |
| 212134_at | PHLDB1 | pleckstrin homology-like domain, family B, member 1 |
| 1562249_at | LOC285965 | hypothetical protein LOC285965 |
| 218786_at | NT5DC3 | 5′-nucleotidase domain containing 3 |
| 208799_at | PSMB5 | proteasome (prosome, macropain) subunit, beta type, 5 |
| 211676_s_at | IFNGR1 | interferon gamma receptor 1 |
| 221789_x_at | RHOT2 | ras homolog gene family, member T2 |
| 231929_at | IKZF2 | IKAROS family zinc finger 2 (Helios) |
| 226470_at | GGTL3 | gamma-glutamyltransferase-like 3 |
| 209795_at | CD69 | CD69 molecule |
| 241671_x_at | FLJ22536 | hypothetical locus LOC401237 |
| 224859_at | CD276 | CD276 molecule |
| 220005_at | P2RY13 | purinergic receptor P2Y, G-protein coupled, 13 |
| 202578_s_at | DDX19A | DEAD (Asp-Glu-Ala-As) box polypeptide 19A |
| 223284_at | NAT14 | N-acetyltransferase 14 |
| 231890_at | NA | NA |
| 224709_s_at | CDC42SE2 | CDC42 small effector 2 |
| 204078_at | SC65 | synaptonemal complex protein SC65 |
| 209606_at | PSCDBP | pleckstrin homology, Sec7 and coiled-coil domains, binding protein |
| 205668_at | LY75 | lymphocyte antigen 75 |
| 208688_x_at | EIF3B | eukaryotic translation initiation factor 3, subunit B |
| 223198_x_at | COMMD5 | COMM domain containing 5 |
| 220168_at | CASC1 | cancer susceptibility candidate 1 |
| 229026_at | CDC42SE2 | CDC42 small effector 2 |
| 243170_at | LOC339745 | hypothetical protein LOC339745 |
| 1556209_at | CLEC2B | C-type lectin domain family 2, member B |
| 52164_at | C11orf24 | chromosome 11 open reading frame 24 |
| 231592_at | XIST | X (inactive)-specific transcript |
| 209078_s_at | TXN2 | thioredoxin 2 |
| 239726_at | ANK3 | ankyrin 3, node of Ranvier (ankyrin G) |
| 213587_s_at | ATP6V0E2 | ATPase, H+ transporting V0 subunit e2 |
| 219343_at | CDC37L1 | cell division cycle 37 homolog (S. cerevisiae)-like 1 |
| 218723_s_at | C13orf15 | chromosome 13 open reading frame 15 |
| 204233_s_at | CHKA | choline kinase alpha |
| 220241_at | TMCO3 | transmembrane and coiled-coil domains 3 |
| 205856_at | SLC14A1 | solute carrier family 14 (urea transporter), member 1 (Kidd blood group) |
| 201981_at | PAPPA | pregnancy-associated plasma protein A, pappalysin 1 |
| 213196_at | ZNF629 | zinc finger protein 629 |
| 225531_at | CABLES1 | Cdk5 and Abl enzyme substrate 1 |
| 228094_at | AMICA1 | adhesion molecule, interacts with CXADR antigen 1 |
| 1565544_at | RNF141 | ring finger protein 141 |
| 207651_at | GPR171 | G protein-coupled receptor 171 |
| 227929_at | NA | NA |
| 203679_at | TMED1 | transmembrane emp24 protein transport domain containing 1 |
| 214901_at | ZNF8 | zinc finger protein 8 |
| 201008_s_at | TXNIP | thioredoxin interacting protein |
| 203642_s_at | COBLL1 | COBL-like 1 |
| 222802_at | EDN1 | endothelin 1 |
| 212379_at | GART | phosphoribosylglycinamide formyltransferase, |
| | | phosphoribosylglycinamide synthetase, phosphoribosylaminoimidazole |
| | | synthetase |
| 226971_at | CCDC136 | coiled-coil domain containing 136 |
| 218956_s_at | PTCD1 | pentatricopeptide repeat domain 1 |
| 227135_at | ASAHL | N-acylsphingosine amidohydrolase (acid ceramidase)-like |
| 229047_at | PLEKHB1 | pleckstrin homology domain containing, family B (evectins) member 1 |
| 209277_at | TFPI2 | tissue factor pathway inhibitor 2 |
| 209129_at | TRIP6 | thyroid hormone receptor interactor 6 |
| 228565_at | KIAA1804 | mixed lineage kinase 4 |
| 239499_at | DNAH2 | dynein, axonemal, heavy chain 2 |
| 228054_at | TMEM44 | transmembrane protein 44 |
| 213551_x_at | CISD3 | CDGSH iron sulfur domain 3 |
| 242765_at | MOBP | myelin-associated oligodendrocyte basic protein |
| 215314_at | ANK3 | ankyrin 3, node of Ranvier (ankyrin G) |
| 222462_s_at | BACE1 | beta-site APP-cleaving enzyme 1 |
| 213077_at | YTHDC2 | YTH domain containing 2 |
| 209150_s_at | TM9SF1 | transmembrane 9 superfamily member 1 |
| 238693_at | PHC3 | polyhomeotic homolog 3 (Drosophila) |
| 225475_at | MIER1 | mesoderm induction early response 1 homolog (Xenopus laevis) |
| 222520_s_at | IFT57 | intraflagellar transport 57 homolog (Chlamydomonas) |
| 210260_s_at | TNFAIP8 | tumour necrosis factor, alpha-induced protein 8 |
| 208894_at | HLA-DRA | major histocompatibility complex, class II, DR alpha |
| 214218_s_at | XIST | X (inactive)-specific transcript |
| 208498_s_at | AMY1A | amylase, alpha 1A (salivary) |
| 231084_at | C10orf79 | chromosome 10 open reading frame 79 |
| 232114_at | MED12L | mediator complex subunit 12-like |
| 204897_at | PTGER4 | prostaglandin E receptor 4 (subtype EP4) |
| 221874_at | KIAA1324 | KIAA1324 |
| 221728_x_at | XIST | X (inactive)-specific transcript |
| 221205_at | NA | NA |
| 205987_at | CD1C | CD1c molecule |
| 200924_s_at | SLC3A2 | solute carrier family 3 (activators of dibasic and neutral amino acid |
| | | transport), member 2 |
| 201010_s_at | TXNIP | thioredoxin interacting protein |
| 209254_at | KIAA0265 | KIAA0265 protein |
| 244335_at | NA | NA |
| 203071_at | SEMA3B | sema domain, immunoglobulin domain (Ig), short basic domain, secreted, |
| | | (semaphorin) 3B |
| 219368_at | NAP1L2 | nucleosome assembly protein 1-like 2 |
| 35685_at | RING1 | ring finger protein 1 |
| 1558111_at | MBNL1 | muscleblind-like (Drosophila) |
| 211421_s_at | RET | ret proto-oncogene |
| 235048_at | KIAA0888 | KIAA0888 protein |
| 226538_at | MAN2A1 | mannosidase, alpha, class 2A, member 1 |
| 240013_at | NA | NA |
| 226118_at | CENPO | centromere protein O |
| 204778_x_at | HOXB7 | homeobox B7 |
| 210306_at | L3MBTL | l(3)mbt-like (Drosophila) |
| 203967_at | CDC6 | cell division cycle 6 homolog (S. cerevisiae) |
| 207714_s_at | SERPINH1 | serpin peptidase inhibitor, clade H (heat shock protein 47), member 1, |
| | | (collagen binding protein 1) |
| 236707_at | DAPP1 | dual adaptor of phosphotyrosine and 3-phosphoinositides |
| 225736_at | FBXO22 | F-box protein 22 |
| 222858_s_at | DAPP1 | dual adaptor of phosphotyrosine and 3-phosphoinositides |
| 212349_at | POFUT1 | protein O-fucosyltransferase 1 |
| 201938_at | CDK2AP1 | CDK2-associated protein 1 |
| 203577_at | GTF2H4 | general transcription factor IIH, polypeptide 4, 52 kDa |
| 223571_at | C1QTNF6 | C1q and tumour necrosis factor related protein 6 |
| 202727_s_at | IFNGR1 | interferon gamma receptor 1 |
| 227165_at | C13orf3 | chromosome 13 open reading frame 3 |
| 230330_at | NA | NA |
| 225230_at | TMEM77 | transmembrane protein 77 |
| 205997_at | ADAM28 | ADAM metallopeptidase domain 28 |
| 204921_at | GAS8 | growth arrest-specific 8 |
| 242874_at | C14orf161 | chromosome 14 open reading frame 161 |
| 232204_at | EBF1 | early B-cell factor 1 |
| 203793_x_at | PCGF2 | polycomb group ring finger 2 |
| 241956_at | PCGF5 | polycomb group ring finger 5 |
| 1556341_s_at | MAPK12 | mitogen-activated protein kinase 12 |
| 236694_at | CYorf15A | chromosome Y open reading frame 15A |
| 205421_at | SLC22A3 | solute carrier family 22 (extraneuronal monoamine transporter), member 3 |
| 215359_x_at | ZNF44 | zinc finger protein 44 |
| 235569_at | VPS37D | vacuolar protein sorting 37 homolog D (S. cerevisiae) |
| 1553555_at | TAS2R38 | taste receptor, type 2, member 38 |
| 220933_s_at | ZCCHC6 | zinc finger, CCHC domain containing 6 |
| 224588_at | XIST | X (inactive)-specific transcript |
| 214983_at | TTTY15 | testis-specific transcript, Y-linked 15 |
| 226042_at | EDC3 | enhancer of mRNA decapping 3 homolog (S. cerevisiae) |
| 222654_at | IMPAD1 | inositol monophosphatase domain containing 1 |
| 230521_at | C9orf100 | chromosome 9 open reading frame 100 |
| 217147_s_at | TRAT1 | T cell receptor associated transmembrane adaptor 1 |
| 212671_s_at | HLA-DQA1 | major histocompatibility complex, class II, DQ alpha 1 |
| 226515_at | CCDC127 | coiled-coil domain containing 127 |
| 228604_at | NA | NA |
| 208296_x_at | TNFAIP8 | tumour necrosis factor, alpha-induced protein 8 |
| 1557458_s_at | SHB | Src homology 2 domain containing adaptor protein B |

TABLE 3
Median (MeTr) and standard deviation values to be used for each probe set in
the Z-score gene normalization process of additional samples to predict.

| PS | MeTr | SdTr | PS | MeTr | SdTr |
|---|---|---|---|---|---|
| 221874_at | 3.735555556 | 1.498642599 | 227035_x_at | 8.078481481 | 0.7939384 |
| 205001_s_at | 4.250296296 | 2.669998067 | 239486_at | 7.085814815 | 1.18046764 |
| 206700_s_at | 4.832962963 | 3.780006273 | 207651_at | 7.212777778 | 2.7013526 |
| 228492_at | 4.42062963 | 3.11154299 | 212379_at | 5.208407407 | 0.776659279 |
| 201909_at | 5.660296296 | 4.918408348 | 213008_at | 7.903148148 | 0.951460889 |
| 205000_at | 5.191740741 | 4.106817592 | 1559992_a_at | 3.817111111 | 2.12575949 |
| 204409_s_at | 4.786777778 | 3.56263426 | 228604_at | 5.894888889 | 0.536288982 |
| 202290_at | 5.938296296 | 0.72292817 | 231929_at | 8.477703704 | 2.060388795 |
| 232618_at | 4.668444444 | 3.531325686 | 1554999_at | 3.834222222 | 0.632537401 |
| 230760_at | 4.131296296 | 2.607831398 | 202982_s_at | 3.71362963 | 0.768429325 |
| 223646_s_at | 4.036740741 | 2.675184316 | 210976_s_at | 9.03537037 | 0.842905148 |
| 204410_at | 3.710851852 | 2.1253079 | 225736_at | 7.191148148 | 0.870766934 |
| 223645_s_at | 3.871518519 | 2.479751265 | 209606_at | 5.603296296 | 2.250845616 |
| 1563497_at | 6.229481481 | 1.467691944 | 223057_s_at | 3.143407407 | 1.035573689 |
| 224590_at | 7.618444444 | 3.504936259 | 223198_x_at | 5.355444444 | 0.88650803 |
| 214131_at | 4.196703704 | 2.708235727 | 209795_at | 7.511222222 | 2.499596542 |
| 210052_s_at | 6.778111111 | 1.039518614 | 204724_s_at | 4.492851852 | 2.042978721 |
| 226515_at | 4.869037037 | 0.708024961 | 235310_at | 3.183888889 | 1.447016435 |
| 207063_at | 4.036962963 | 2.799074634 | 210306_at | 3.84737037 | 1.312793708 |
| 243010_at | 5.109148148 | 1.267617987 | 214218_s_at | 8.277851852 | 4.064141358 |
| 212654_at | 4.939259259 | 1.536294508 | 211700_s_at | 4.926333333 | 1.307593944 |
| 216540_at | 2.69362963 | 0.705972768 | 201008_s_at | 11.36133333 | 1.314222789 |
| 204603_at | 5.347666667 | 1.481179026 | 1554082_a_at | 3.402333333 | 0.426647936 |
| 211149_at | 4.00937037 | 2.432231567 | 212684_at | 8.63137037 | 0.845236933 |
| 205419_at | 6.541814815 | 2.066171507 | 212349_at | 7.416888889 | 0.873647585 |
| 204233_s_at | 4.973444444 | 1.428486648 | 236627_at | 3.457407407 | 1.556752445 |
| 203992_s_at | 5.392703704 | 0.630835942 | 209254_at | 2.963962963 | 0.724238352 |
| 225882_at | 6.582185185 | 1.289188625 | 217431_x_at | 2.931555556 | 0.896655123 |
| 1562031_at | 6.418111111 | 1.556170036 | 213569_at | 4.402592593 | 1.518797532 |
| 223945_x_at | 7.422703704 | 0.78219375 | 232311_at | 6.727333333 | 1.624796934 |
| 222778_s_at | 5.146555556 | 1.445108549 | 59697_at | 2.713740741 | 0.681133365 |
| 212877_at | 5.259888889 | 1.038206046 | 218009_s_at | 7.019037037 | 0.997693821 |
| 227165_at | 4.345666667 | 1.214929121 | 235421_at | 5.102703704 | 1.433031961 |
| 241671_x_at | 5.631851852 | 1.41085726 | 229047_at | 3.83237037 | 1.437256552 |
| 208799_at | 10.34044444 | 0.564118327 | 236336_at | 2.739814815 | 0.773122591 |
| 231592_at | 6.629851852 | 3.117227413 | 206035_at | 5.663518519 | 0.983095205 |
| 202948_at | 7.906666667 | 1.370910674 | 1559086_at | 3.837703704 | 1.049297377 |
| 221728_x_at | 9.065259259 | 4.294752277 | 219376_at | 3.87862963 | 1.158847543 |
| 205668_at | 8.345259259 | 1.805612715 | 206666_at | 6.727444444 | 2.914033424 |
| 205447_s_at | 4.681074074 | 0.990239751 | 238106_at | 4.396037037 | 1.618067425 |
| 211421_s_at | 2.538111111 | 0.430160912 | 235711_at | 6.971407407 | 0.76008179 |
| 214901_at | 4.256185185 | 1.116067893 | 201009_s_at | 11.53896296 | 1.210551765 |
| 226309_at | 3.79837037 | 1.248261811 | 209625_at | 5.637888889 | 0.464933604 |
| 214983_at | 3.198703704 | 1.57620398 | 214421_x_at | 2.250518519 | 0.073495877 |
| 234340_at | 4.440518519 | 0.76657833 | 200905_x_at | 10.67244444 | 1.201677492 |
| 232019_at | 6.387148148 | 1.074771056 | 201010_s_at | 12.12874074 | 1.117662863 |
| 1556340_at | 3.07162963 | 1.434780502 | 212671_s_at | 8.684185185 | 2.733300105 |
| 208894_at | 11.48414815 | 1.672970773 | 1558034_s_at | 6.453777778 | 2.795619559 |
| 228128_x_at | 6.448555556 | 1.796760233 | 219528_s_at | 6.061814815 | 1.975562744 |
| 227791_at | 6.946962963 | 1.453951128 | 217147_s_at | 6.370851852 | 2.708088479 |
| 209774_x_at | 6.540148148 | 2.083583114 | 211595_s_at | 6.282518519 | 0.773201356 |
| 205027_s_at | 4.596185185 | 1.13980761 | 216958_s_at | 4.95037037 | 1.019515652 |
| 228565_at | 2.713111111 | 0.559198281 | 209869_at | 4.65737037 | 1.702115181 |
| 219777_at | 8.813481481 | 1.396394654 | 231229_at | 6.128407407 | 1.87356169 |
| 205890_s_at | 8.542185185 | 3.341343466 | 210538_s_at | 7.208481481 | 2.174288131 |
| 205856_at | 2.911851852 | 0.831187506 | 212378_at | 8.916666667 | 0.576938072 |
| 236694_at | 3.213888889 | 1.517183938 | 204116_at | 6.18562963 | 2.973054544 |
| 223095_at | 10.61007407 | 1.130389481 | 203536_s_at | 6.497111111 | 0.810879263 |
| 223530_at | 4.503444444 | 1.032167187 | 204897_at | 9.082296296 | 1.756879441 |
| 1556677_at | 2.714703704 | 0.816774322 | 1560463_at | 5.278777778 | 0.632175142 |
| 205204_at | 4.921814815 | 1.05426814 | 218805_at | 10.71722222 | 1.565635834 |
| 229237_s_at | 2.458851852 | 0.383116542 | 222463_s_at | 2.867111111 | 1.01675942 |
| 229598_at | 6.073777778 | 1.870162752 | 218460_at | 7.073074074 | 0.874841917 |
| 210982_s_at | 12.02188889 | 1.658298696 | 214079_at | 3.101333333 | 1.505496519 |
| 211954_s_at | 9.853185185 | 0.606406441 | 204676_at | 5.989592593 | 0.814374383 |
| 205841_at | 6.449518519 | 1.181669138 | 202871_at | 2.781888889 | 0.551343557 |
| 244482_at | 3.238 | 1.417702855 | 238362_at | 2.938703704 | 0.869119794 |
| 239146_at | 6.817148148 | 1.762964171 | 211796_s_at | 6.711037037 | 3.224351879 |
| 212801_at | 6.47637037 | 0.866973389 | 220326_s_at | 4.435 | 1.212985985 |
| 1555893_at | 2.295259259 | 0.121789097 | 1555852_at | 6.557740741 | 1.995623839 |
| 213539_at | 7.035296296 | 3.206927679 | 1552947_x_at | 2.838148148 | 1.002181724 |
| 242907_at | 8.783481481 | 1.783119595 | 201364_s_at | 5.101703704 | 0.809843281 |
| 217885_at | 8.076074074 | 0.867512533 | 241352_at | 4.007444444 | 1.90389583 |
| 219604_s_at | 3.202333333 | 0.766778927 | 218553_s_at | 4.482592593 | 1.202271672 |
| 223758_s_at | 7.231962963 | 0.893752826 | 207397_s_at | 3.032666667 | 1.292384647 |
| 200904_at | 11.96414815 | 1.222626829 | 221905_at | 6.601333333 | 0.878449333 |
| 219844_at | 4.545740741 | 1.00157774 | 222777_s_at | 4.825740741 | 0.835000304 |
| 207754_at | 2.628592593 | 0.581828633 | 242874_at | 5.062037037 | 1.707916555 |
| 235930_at | 3.180925926 | 1.467888068 | 208729_x_at | 10.43914815 | 1.570138669 |
| 221205_at | 6.483666667 | 0.678635112 | 228964_at | 8.553814815 | 1.316678953 |
| 207126_x_at | 3.091925926 | 1.339656814 | 211519_s_at | 2.96462963 | 0.770526501 |
| 238609_at | 5.892 | 0.904977475 | 206618_at | 3.472481481 | 1.103944584 |
| 220005_at | 5.036444444 | 1.987762297 | 226479_at | 9.582481481 | 0.75387182 |
| 1569813_at | 5.990925926 | 0.71489052 | 226854_at | 5.276555556 | 0.804695897 |
| 232928_at | 3.541851852 | 1.177299573 | 211799_x_at | 7.847962963 | 1.447203603 |
| 1557116_at | 10.29211111 | 1.799284331 | 226474_at | 8.065851852 | 2.115930268 |
| 213293_s_at | 10.33585185 | 1.544386229 | 219368_at | 4.653 | 1.663526306 |
| 216920_s_at | 5.415592593 | 2.06213221 | 64064_at | 10.264 | 1.686352276 |
| 222910_s_at | 3.173592593 | 1.645770716 | 1555225_at | 6.714 | 1.085750184 |
| 225502_at | 6.708851852 | 1.857196371 | 224709_s_at | 12.63725926 | 0.66596573 |
| 203915_at | 9.095111111 | 3.626460823 | 218504_at | 4.864 | 0.824222617 |
| 210322_x_at | 2.881037037 | 1.171392383 | 240088_at | 2.848518519 | 0.407447342 |
| 214738_s_at | 2.354925926 | 0.193228029 | 219440_at | 3.258814815 | 1.070536711 |
| 206637_at | 9.558148148 | 1.886364956 | 228094_at | 6.580740741 | 1.958797838 |
| 235668_at | 4.768925926 | 0.885462197 | 219499_at | 4.291814815 | 0.867588968 |
| 225884_s_at | 8.046555556 | 0.690815145 | 222895_s_at | 9.286111111 | 2.657360436 |
| 235453_at | 2.771703704 | 0.499015555 | 202746_at | 9.989222222 | 1.384098355 |
| 210983_s_at | 5.356074074 | 0.830564263 | 1566970_at | 3.093407407 | 1.212494417 |
| 222962_s_at | 5.373814815 | 1.14924052 | 213564_x_at | 12.88977778 | 0.653111095 |
| 208296_x_at | 8.387 | 1.646044046 | 207912_s_at | 3.473148148 | 2.246697657 |
| 215591_at | 3.484296296 | 0.916086862 | 215670_s_at | 2.722074074 | 0.570447997 |
| 209140_x_at | 11.60314815 | 1.621305972 | 1563420_at | 2.360962963 | 0.261750245 |
| 201081_s_at | 3.924740741 | 0.51258137 | 238959_at | 3.313481481 | 0.504845016 |
| 219681_s_at | 9.266518519 | 1.129900655 | 226498_at | 5.325814815 | 1.070877822 |
| 210972_x_at | 7.295407407 | 2.54768316 | 205426_s_at | 4.347814815 | 0.85408246 |
| 224153_s_at | 6.481814815 | 0.739652103 | 201030_x_at | 12.75214815 | 0.73563864 |
| 211911_x_at | 10.68392593 | 1.692384047 | 213295_at | 9.315777778 | 0.994027756 |
| 231827_at | 6.686185185 | 0.967367245 | 239834_at | 5.532407407 | 1.012674648 |
| 211991_s_at | 10.17951852 | 1.908868621 | 210325_at | 5.896407407 | 2.83225006 |
| 224588_at | 8.316703704 | 4.210382303 | 226504_at | 4.700777778 | 1.158195823 |
| 230968_at | 6.290518519 | 1.345499689 | 235688_s_at | 6.055777778 | 1.52548969 |
| 1559224_at | 3.077259259 | 0.917557652 | 232617_at | 10.36885185 | 1.611772906 |
| 210260_s_at | 7.369296296 | 1.777256914 | 39582_at | 8.727962963 | 0.994076513 |
| 223699_at | 3.626074074 | 2.333047329 | | | |
| 205677_s_at | 6.679185185 | 1.021482258 | | | |
| 1557759_at | 3.073518519 | 0.261932518 | | | |
| 235242_at | 8.720703704 | 1.137808684 | | | |
| 229046_s_at | 2.742814815 | 0.703204316 | | | |
| 227316_at | 8.357666667 | 0.738688963 | | | |
| 213975_s_at | 12.12581481 | 1.52359446 | | | |
| 210915_x_at | 6.363592593 | 3.050893365 | | | |
| 1555487_a_at | 3.920407407 | 1.090175401 | | | |
| 208268_at | 6.520962963 | 2.003670353 | | | |
| 1561042_at | 3.179518519 | 1.267582872 | | | |
| 227135_at | 7.392111111 | 1.210907363 | | | |
| 222802_at | 3.25937037 | 1.306707788 | | | |
| 232053_x_at | 2.782148148 | 0.848160575 | | | |
| 223168_at | 7.757444444 | 1.16521323 | | | |
| 206978_at | 6.884222222 | 2.341644513 | | | |
| 217501_at | 9.457777778 | 0.545973255 | | | |
| 212776_s_at | 3.821074074 | 1.104182396 | | | |
| 211756_at | 2.676962963 | 0.731265893 | | | |
| 235239_at | 3.072407407 | 0.633552697 | | | |
| 203868_s_at | 10.83881481 | 1.776208733 | | | |
| 222943_at | 3.357 | 1.884710445 | | | |
| 211742_s_at | 5.958185185 | 2.003553862 | | | |
| 204806_x_at | 9.718259259 | 1.447679485 | | | |

TABLE 4
Pearson analysis

| ProbeSetId | Description |
|---|---|
| 243010_at | musashi homolog 2 (Drosophila) |
| 224153_s_at | |
| 218363_at | exonuclease 3′-5′ domain-like 2 |
| 231229_at | histone linker H1 domain, spermatid-specific 1 |
| 209774_x_at | chemokine (C—X—C motif) ligand 2 |
| 228786_at | |
| 209606_at | pleckstrin homology, Sec7 and coiled-coil |
| | domains, |
| 236681_at | homeobox D13 |
| 224908_s_at | tubulin tyrosine ligase |
| 205204_at | neuromedin B |
| 217995_at | sulfide quinone reductase-like (yeast) |
| 235391_at | family with sequence similarity 92, member A1 |
| 204078_at | |
| 210538_s_at | baculoviral IAP repeat-containing 3 |
| 205890_s_at | ubiquitin D |
| 200905_x_at | major histocompatibility complex, class I, E |
| 212654_at | tropomyosin 2 (beta) |
| 206035_at | v-rel reticuloendotheliosis viral oncogene |
| | homolog |
| 225502_at | dedicator of cytokinesis 8 |
| 201010_s_at | thioredoxin interacting protein |
| 208478_s_at | BCL2-associated X protein |
| 212349_at | protein O-fucosyltransferase 1 |
| 228812_at | |
| 225853_at | glucosamine-phosphate N-acetyltransferase 1 |
| 211700_s_at | trophinin |
| 205696_s_at | GDNF family receptor alpha 1 |
| 235421_at | mitogen-activated protein kinase kinase kinase 8 |
| 237439_at | ubiquitin specific peptidase 43 |
| 223819_x_at | COMM domain containing 5 |
| 229598_at | COBL-like 1 |
| 1563497_at | ubiquitin specific peptidase 25 |
| 217885_at | importin 9 |
| 236627_at | |
| 232019_at | zinc finger protein 694 |
| 204897_at | prostaglandin E receptor 4 (subtype EP4) |
| 232311_at | beta-2-microglobulin |
| 212877_at | kinesin 2 |
| 204233_s_at | choline kinase alpha |
| 227035_x_at | |
| 244393_x_at | aldo-keto reductase family 1, member C-like 2 |
| 209849_s_at | RAD51 homolog C (S. cerevisiae) |
| 205273_s_at | pitrilysin metallopeptidase 1 |
| 200904_at | major histocompatibility complex, class I, E |
| 226043_at | G-protein signalling modulator 1 (AGS3-like, C. el |
| 1556049_at | reticulon 4 |
| 225882_at | solute carrier family 35, member B4 |
| 225432_s_at | CSRP2 binding protein |
| 214901_at | zinc finger protein 8 (clone HF.18) |
| 1555852_at | transporter 1, ATP-binding cassette, sub-family B |
| 225736_at | F-box protein 22 |
| 208296_x_at | tumour necrosis factor, alpha-induced protein 8 |
| 211603_s_at | ets variant gene 4 (E1A enhancer binding protein, |
| 209894_at | leptin receptor |
| 204806_x_at | major histocompatibility complex, class I, F |
| 239486_at | |
| 216438_s_at | thymosin, beta 4, X-linked |
| 235473_at | mediator of RNA polymerase II transcription, subun |
| 1561042_at | integrin, beta 1 (fibronectin receptor, beta polyp |
| 217456_x_at | major histocompatibility complex, class I, E |
| 204116_at | interleukin 2 receptor, gamma (severe combined imm |
| 218807_at | vav 3 oncogene |
| 212671_s_at | major histocompatibility complex, class II, DQ alp |
| 241671_x_at | |
| 202546_at | vesicle-associated membrane protein 8 (endobrevin) |
| 91684_g_at | exosome component 4 |
| 205419_at | Epstein-Barr virus induced gene 2 (lymphocyte-spec |
| 238925_at | syntrophin, beta 2 (dystrophin-associated protein |
| 228604_at | family with sequence similarity 76, member A |
| 241670_x_at | |
| 207651_at | G protein-coupled receptor 171 |
| 223593_at | aminoadipate aminotransferase |
| 205027_s_at | mitogen-activated protein kinase kinase kinase 8 |
| 201009_s_at | thioredoxin interacting protein |
| 202828_s_at | matrix metallopeptidase 14 (membrane-inserted) |
| 228376_at | glycoprotein, alpha-galactosyltransferase 1 |
| 216920_s_at | |
| 221265_s_at | chromosome 15 open reading frame 44 |
| 221875_x_at | major histocompatibility complex, class I, F |
| 243502_at | gap junction protein, alpha 7, 45 kDa (connexin 45) |
| 210260_s_at | tumour necrosis factor, alpha-induced protein 8 |
| 202544_at | glia maturation factor, beta |
| 223646_s_at | chromosome Y open reading frame 15B |
| 200615_s_at | adaptor-related protein complex 2, beta 1 subunit |
| 235688_s_at | TNF receptor-associated factor 4 |
| 209567_at | RRS1 ribosome biogenesis regulator homolog (S. cer |
| 213008_at | KIAA1794 |
| 211529_x_at | HLA-G histocompatibility antigen, class I, G |
| 204410_at | eukaryotic translation initiation factor 1A, Y-lin |
| 223746_at | serine/threonine kinase 4 |
| 226778_at | chromosome 8 open reading frame 42 |
| 223945_x_at | |
| 223168_at | ras homolog gene family, member U |
| 209140_x_at | major histocompatibility complex, class I, B |
| 204266_s_at | choline kinase alpha |
| 211595_s_at | mitochondrial ribosomal protein S11 |
| 208799_at | proteasome (prosome, macropain) subunit, beta |
| | type |
| 213539_at | CD3d antigen, delta polypeptide (TiT3 complex) |
| 236203_at | major histocompatibility complex, class II, DQ |
| | alp |
| 208885_at | lymphocyte cytosolic protein 1 (L-plastin) |
| 207397_s_at | homeobox D13 |

TABLE 5
Multivariate Baldi gene list

| ProbeSet Id | Description |
|---|---|
| 1555852_at | transporter 1, ATP-binding cassette, sub-family B |
| 1559584_a_at | mitogen-activated protein kinase 12 |
| 200905_x_at | ceruloplasmin (ferroxidase) |
| 202688_at | Pvt1 oncogene homolog, MYC activator (mouse) |
| 204233_s_at | zinc finger CCCH-type containing 12D |
| 205419_at | chromosome 16 open reading frame 54 |
| 206082_at | integrin, beta 1 (fibronectin receptor, beta polyp |
| 207175_at | Janus kinase 2 (a protein tyrosine kinase) |
| 209774_x_at | ubiquitin specific peptidase 25 |
| 210915_x_at | major histocompatibility complex, class I, E |
| 212587_s_at | major histocompatibility complex, class I, E |
| 212813_at | thioredoxin interacting protein |
| 215313_x_at | thioredoxin interacting protein |
| 218805_at | beta-2-microglobulin |
| 223593_at | vesicle-associated membrane protein 8 (endobrevin) |
| 226218_at | tumour necrosis factor (ligand) superfamily, member |
| 227550_at | chemokine (C-X-C motif) ligand 9 |
| 228812_at | interferon regulatory factor 8 |
| 232311_at | |
| 235688_s_at | interleukin 2 receptor, gamma (severe combined imm |
| 241671_x_at | choline kinase alpha |
| 1556340_at | CD52 antigen (CAMPATH-1 antigen) |
| 1561042_at | collagen, type IX, alpha 3 |
| 201009_s_at | colony stimulating factor 2 receptor, beta, low-af |
| 203915_at | neuromedin B |
| 204661_at | Epstein-Barr virus induced gene 2 (lymphocyte-spec |
| 205668_at | lymphocyte antigen 75 |
| 206134_at | GDNF family receptor alpha 1 |
| 207651_at | CD8 antigen, alpha polypeptide (p32) |
| 209795_at | ubiquitin D |
| 210972_x_at | HLA complex P5 |
| 212588_at | ADAM-like, decysin 1 |
| 213193_x_at | galactosidase, beta 1-like |
| 216438_s_at | protein tyrosine phosphatase type IVA, member 3 |
| 218807_at | granzyme K (granzyme 3, tryptase II) |
| 224896_s_at | adiponectin, C1Q and collagen domain containing |
| 226219_at | G protein-coupled receptor 171 |
| 228017_s_at | tumour necrosis factor, alpha-induced protein 8 |
| 229152_at | pleckstrin homology, Sec7 and coiled-coil domains, |
| 232843_s_at | alcohol dehydrogenase IB (class I), beta polypepti |
| 236203_at | chemokine (C-X-C motif) ligand 2 |
| 243010_at | CD69 antigen (p60, early T-cell activation antigen |
| 1558034_s_at | leptin receptor |
| 1562031_at | tumour necrosis factor, alpha-induced protein 8 |
| 201010_s_at | baculoviral IAP repeat-containing 3 |
| 204057_at | T cell receptor beta variable 19 |
| 204724_s_at | T cell receptor delta variable 2 |
| 205696_s_at | ets variant gene 4 (E1A enhancer binding protein, |
| 206540_at | trophinin |
| 208296_x_at | T cell receptor beta variable 3-1 |
| 209894_at | protein tyrosine phosphatase, receptor type, C |
| 211603_s_at | protein tyrosine phosphatase, receptor type, C |
| 212592_at | immunoglobulin J polypeptide, linker protein for i |
| 213539_at | tropomyosin 2 (beta) |
| 216920_s_at | major histocompatibility complex, class II, DQ alp |
| 222838_at | junctional adhesion molecule 3 |
| 224908_s_at | T cell receptor beta constant 1 |
| 227265_at | CD3d antigen, delta polypeptide (TiT3 complex) |
| 228071_at | ADAM metallopeptidase domain 12 (meltrin alpha) |
| 229598_at | killer cell lectin-like receptor subfamily B, memb |
| 235276_at | major histocompatibility complex, class I, A |
| 236627_at | thymosin, beta 4, X-linked |
| 244061_at | |
| 1558290_a_at | complement component 3 |
| 1563497_at | |
| 201891_s_at | GTPase, IMAP family member 5 |
| 204078_at | vav 3 oncogene |
| 205159_at | SLAM family member 7 |
| 205758_at | glucosidase, beta, acid 3 (cytosolic) |
| 206574_s_at | polymerase (RNA) I polypeptide B, 128 kDa |
| 209606_at | aminoadipate aminotransferase |
| 210260_s_at | tubulin tyrosine ligase |
| 211700_s_at | tubulin tyrosine ligase |
| 212654_at | dedicator of cytokinesis 8 |
| 213790_at | solute carrier family 35, member B4 |
| 217767_at | interleukin 7 receptor |
| 222943_at | Rho GTPase activating protein 30 |
| 225502_at | fibrinogen-like 2 |
| 227346_at | zinc finger protein, subfamily 1A, 1 (Ikaros) |
| 228094_at | heparan sulfate (glucosamine) 3-O-sulfotransferase |
| 231229_at | |
| 235391_at | chromosome 20 open reading frame 58 |
| 236681_at | GTPase, IMAP family member 7 |
| 244393_x_at | adhesion molecule, interacts with CXADR antigen 1 |
| 1559263_s_at | |
| 200904_at | |
| 202546_at | chromosome 4 open reading frame 7 |
| 204116_at | COBL-like 1 |
| 205204_at | histone linker H1 domain, spermatid-specific 1 |
| 205890_s_at | |
| 206666_at | beta-2-microglobulin |
| 209613_s_at | dedicator of cytokinesis 8 |
| 210538_s_at | epithelial stromal interaction 1 (breast) |
| 211796_s_at | family with sequence similarity 92, member A1 |
| 212671_s_at | mitogen-activated protein kinase kinase kinase 8 |
| 214470_at | TNF receptor-associated factor 4 |
| 218499_at | major histocompatibility complex, class II, DQ alp |
| 223403_s_at | |
| 225882_at | homeobox D13 |
| 227361_at | |
| 228786_at | |
| 231929_at | musashi homolog 2 (Drosophila) |
| 235421_at | Rho GTPase activating protein 15 |
| 238834_at | aldo-keto reductase family 1, member C-like2 |
| 34210_at | CD52 antigen (CAMPATH-1 antigen) |

TABLE 6
SPCA

| ProbeSet Id | Description |
|---|---|
| 1552584_at | interleukin 12 receptor, beta 1 |
| 1558972_s_at | chromosome 6 open reading frame 190 |
| 1559584_a_at | chromosome 16 open reading frame 54 |
| 1563473_at | protein phosphatase 1, regulatory (inhibitor) subu |
| 203915_at | chemokine (C-X-C motif) ligand 9 |
| 204116_at | interleukin 2 receptor, gamma (severe combined imm |
| 204533_at | chemokine (C-X-C motif) ligand 10 |
| 205242_at | chemokine (C-X-C motif) ligand 13 (B-cell chemoatt |
| 205488_at | granzyme A (granzyme 1, cytotoxic T-lymphocyte-ass |
| 205758_at | CD8 antigen, alpha polypeptide (p32) |
| 205890_s_at | ubiquitin D |
| 206134_at | ADAM-like, decysin 1 |
| 206666_at | granzyme K (granzyme 3, tryptase II) |
| 207651_at | G protein-coupled receptor 171 |
| 209606_at | pleckstrin homology, Sec7 and coiled-coil domains, |
| 209795_at | CD69 antigen (p60, early T-cell activation antigen |
| 210915_x_at | T cell receptor beta variable 19 |
| 210972_x_at | T cell receptor delta variable 2 |
| 211796_s_at | T cell receptor beta variable 3-1 |
| 212592_at | immunoglobulin J polypeptide, linker protein for i |
| 212999_x_at | major histocompatibility complex, class II, DQ bet |
| 213193_x_at | T cell receptor beta constant 1 |
| 213539_at | CD3d antigen, delta polypeptide (TiT3 complex) |
| 214617_at | perforin 1 (pore forming protein) |
| 216920_s_at | |
| 217147_s_at | T cell receptor associated transmembrane adaptor 1 |
| 222838_at | SLAM family member 7 |
| 222895_s_at | B-cell CLL/lymphoma 11B (zinc finger protein) |
| 226218_at | interleukin 7 receptor |
| 227346_at | zinc finger protein, subfamily 1A, 1 (Ikaros) |
| 228362_s_at | |
| 229152_at | chromosome 4 open reading frame 7 |
| 231577_s_at | guanylate binding protein 1, interferon-inducible, |
| 236280_at | |

TABLE 7

| | Value in | | Value in | | Value |
|---|---|---|---|---|---|
| ProbesetId | metagene | ProbesetId | metagene | ProbesetId | in metagene |
| 243010_at | 4.1981 | 244393_x_at | 4.1734 | 243502_at | 2.9835 |
| 224153_s_at | 6.11975 | 209849_s_at | 10.46455 | 210260_s_at | 8.21145 |
| 218363_at | 7.46445 | 205273_s_at | 7.95315 | 202544_at | 11.7167 |
| 231229_at | 5.0826 | 200904_at | 12.81605 | 223646_s_at | 2.75825 |
| 209774_x_at | 7.7947 | 226043_at | 3.91835 | 200615_s_at | 5.74175 |
| 228786_at | 3.95185 | 1556049_at | 7.62715 | 235688_s_at | 5.4642 |
| 209606_at | 7.1185 | 225882_at | 5.8835 | 209567_at | 7.6344 |
| 236681_at | 5.9989 | 225432_s_at | 7.25855 | 213008_at | 7.3653 |
| 224908_s_at | 9.6059 | 214901_at | 3.58985 | 211529_x_at | 8.97615 |
| 205204_at | 4.00725 | 1555852_at | 7.71885 | 204410_at | 2.7465 |
| 217995_at | 9.48115 | 225736_at | 6.634 | 223746_at | 8.9655 |
| 235391_at | 7.133 | 208296_x_at | 9.27055 | 226778_at | 3.78595 |
| 204078_at | 5.4736 | 211603_s_at | 4.00935 | 223945_x_at | 6.9724 |
| 210538_s_at | 8.39055 | 209894_at | 7.57655 | 223168_at | 8.32455 |
| 205890_s_at | 10.7217 | 204806_x_at | 10.7746 | 209140_x_at | 12.58685 |
| 200905_x_at | 11.51055 | 239486_at | 7.65935 | 204266_s_at | 4.98385 |
| 212654_at | 4.04655 | 216438_s_at | 13.89245 | 211595_s_at | 5.8073 |
| 206035_at | 6.382 | 235473_at | 7.0424 | 208799_at | 10.0343 |
| 225502_at | 7.805 | 1561042_at | 2.54365 | 213539_at | 8.76235 |
| 201010_s_at | 12.7636 | 217456_x_at | 10.31775 | 236203_at | 6.30605 |
| 208478_s_at | 3.6941 | 204116_at | 7.8395 | 208885_at | 11.59615 |
| 212349_at | 7.0306 | 218807_at | 8.1423 | 207397_s_at | 2.3551 |
| 228812_at | 7.94125 | 212671_s_at | 10.0539 | | |
| 225853_at | 9.85825 | 241671_x_at | 4.81515 | | |
| 211700_s_at | 4.07 | 202546_at | 10.8191 | | |
| 205696_s_at | 4.4725 | 91684_g_at | 4.68685 | | |
| 235421_at | 6.0634 | 205419_at | 7.50055 | | |
| 237439_at | 5.3148 | 238925_at | 5.6971 | | |
| 223819_x_at | 5.4128 | 228604_at | 6.10995 | | |
| 229598_at | 7.14425 | 241670_x_at | 4.296 | | |
| 1563497_at | 7.0658 | 207651_at | 8.8235 | | |
| 217885_at | 7.606 | 223593_at | 3.5633 | | |
| 236627_at | 2.62845 | 205027_s_at | 4.81415 | | |
| 232019_at | 5.94545 | 201009_s_at | 12.1921 | | |
| 204897_at | 10.1441 | 202828_s_at | 3.60535 | | |
| 232311_at | 7.71315 | 228376_at | 8.1722 | | |
| 212877_at | 4.82955 | 216920_s_at | 6.8166 | | |
| 204233_s_at | 4.32305 | 221265_s_at | 6.9674 | | |
| 227035_x_at | 7.60835 | 221875_x_at | 11.55795 | | |

TABLE 8

| ProbeSetId | Value in Metagene |
|---|---|
| 1555852_at | 7.71885 |
| 1556340_at | 2.3965 |
| 1558034_s_at | 8.0664 |
| 1558290_a_at | 9.06445 |
| 1559263_s_at | 9.4082 |
| 1559584_a_at | 10.0188 |
| 1561042_at | 2.54365 |
| 1562031_at | 7.295 |
| 1563497_at | 7.0658 |
| 200904_at | 12.81605 |
| 200905_x_at | 11.51055 |
| 201009_s_at | 12.1921 |
| 201010_s_at | 12.7636 |
| 201891_s_at | 13.8519 |
| 202546_at | 10.8191 |
| 202688_at | 9.50265 |
| 203915_at | 11.036 |
| 204057_at | 10.9814 |
| 204078_at | 5.4736 |
| 204116_at | 7.8395 |
| 204233_s_at | 4.32305 |
| 204661_at | 8.99365 |
| 204724_s_at | 3.4864 |
| 205159_at | 9.46255 |
| 205204_at | 4.00725 |
| 205419_at | 7.50055 |
| 205668_at | 9.17675 |
| 205696_s_at | 4.4725 |
| 205758_at | 9.1644 |
| 205890_s_at | 10.7217 |
| 206082_at | 7.52315 |
| 206134_at | 9.277 |
| 206540_at | 5.5016 |
| 206574_s_at | 4.20995 |
| 206666_at | 8.16675 |
| 207175_at | 7.7285 |
| 207651_at | 8.8235 |
| 208296_x_at | 9.27055 |
| 209606_at | 7.1185 |
| 209613_s_at | 8.7372 |
| 209774_x_at | 7.7947 |
| 209795_at | 8.7526 |
| 209894_at | 7.57655 |
| 210260_s_at | 8.21145 |
| 210538_s_at | 8.39055 |
| 210915_x_at | 7.83255 |
| 210972_x_at | 8.64305 |
| 211603_s_at | 4.00935 |
| 211700_s_at | 4.07 |
| 211796_s_at | 8.42035 |
| 212587_s_at | 11.9281 |
| 212588_at | 9.4714 |
| 212592_at | 10.15105 |
| 212654_at | 4.04655 |
| 212671_s_at | 10.0539 |
| 212813_at | 11.41345 |
| 213193_x_at | 8.2094 |
| 213539_at | 8.76235 |
| 213790_at | 8.2969 |
| 214470_at | 7.66275 |
| 215313_x_at | 12.5728 |
| 216438_s_at | 13.89245 |
| 216920_s_at | 6.8166 |
| 217767_at | 10.25435 |
| 218499_at | 8.77755 |
| 218805_at | 11.4793 |
| 218807_at | 8.1423 |
| 222838_at | 8.6475 |
| 222943_at | 2.34225 |
| 223403_s_at | 9.84385 |
| 223593_at | 3.5633 |
| 224896_s_at | 10.35155 |
| 224908_s_at | 9.6059 |
| 225502_at | 7.805 |
| 225882_at | 5.8835 |
| 226218_at | 10.44915 |
| 226219_at | 7.24985 |
| 227265_at | 10.99465 |
| 227346_at | 9.9391 |
| 227361_at | 6.83655 |
| 227550_at | 8.60875 |
| 228017_s_at | 2.86415 |
| 228071_at | 8.78515 |
| 228094_at | 7.5848 |
| 228786_at | 3.95185 |
| 228812_at | 7.94125 |
| 229152_at | 8.7441 |
| 229598_at | 7.14425 |
| 231229_at | 5.0826 |
| 231929_at | 9.37265 |
| 232311_at | 7.71315 |
| 232843_s_at | 9.8371 |
| 235276_at | 8.5938 |
| 235391_at | 7.133 |
| 235421_at | 6.0634 |
| 235688_s_at | 5.4642 |
| 236203_at | 6.30605 |
| 236627_at | 2.62845 |
| 236681_at | 5.9989 |
| 238834_at | 2.2871 |
| 241671_x_at | 4.81515 |
| 243010_at | 4.1981 |
| 244061_at | 7.1302 |
| 244393_x_at | 4.1734 |
| 34210_at | 9.9364 |

TABLE 9
18 PS gene list, target sequences

| | |
|---|---|
| Probe Set ID | Target sequence |

| | |
|---|---|
| 1562031_at | atgttcactgtatgtgccaagcctaatatgagagctatgtattatagagtttatgctacagccctaccttcaggaaacttat |
| SEQ ID | ctactggacaaacaaaaattttcaaatatacaaaaaattctaaatcgaacattgtaattatctagcataggcaaatatagac |
| NO: 1 | agtaacagacaggtttacaattattaagaaagggcagccagg |
| 1563497_at | taccatagcaagttcttatcctttgttaatatattataaatacgacttttttcctttacctgtcacagtaatatgccaattt |
| SEQ ID | ttggtgtcgctttagtaatttttttgggggggactgtcaaatttcagtaaactttataggctatagtttacaatttaaggtc |
| NO: 2 | tttcctcagttgtctcctaaaaaattttgtggaaatcgaaatttcttttcaattgatcgtcttgtgcagccctttaaaaaat |
| | gcgttttgcattcatgtctttgcagtacaaatctgtatctttcattttgggagtgactgtcatagatgggtaatataaagtg |
| | acaacacacacaccagggccagattgcgtgggttctagctagggacctagagctggttacttgatttctctctgttccattt |
| | actatctg |
| 202290_at | agggctcatcgacatcgagaaccccaaccgggtggcacagacaaccaaaaaggtcacacaactggatctggacgggccaaag |
| SEQ ID | gagctttcgaggagagaacgagaagagattgagaagcagaaggcaaaagagcgttacatgaaaatgcacttggccgggaaga |
| NO: 3 | cagagcaagccaaggctgacctggcccggctggccatcatccggaaacagcgggaggaggctgcccggaagaaggaagagga |
| | aaggaaagcaaaagacgatgccacattgtcaggaaaacgaatgcagtcactctccctgaataagtaactgcgacccgtggga |
| | ggagatgccggggacctgggccgcgctgccaggacctctgctgtgtctcgcccaccctgtgccctggcgccgctgcaacagc |
| | ccctcatggccaggagccccccatgcctgggcctcctcttcatcttggcacagaaattgtttgggggatgggggggggactg |
| | ggggaggggtagctgctatctttgagacag |
| 203992_s_at | aggaaataacccagttctgcaccactggtttttgtagctatctcgtaaggctgctggctgaaaactgtgtctatgcaacctt |
| SEQ ID | ccaagtgcggagtgtcaaccaactggacgggagagagtactgctcctactccaggactctcacaaagctgatgagctgtact |
| NO: 4 | tcagaaaaaaataataatttccatgttttgtatatatctgacaaaactggcaacatcttacagactactgacttgaagacaa |
| | cctcttttatatttctctatttctgggctgatgaatttgttttcatctgtcttttcccccttcagaattttccttggaaaaa |
| | aaatactagcctagctggtcatttctttgtaaggtagttagcaattttaagtctttctttggtcaacttttttttaatgtga |
| | aaagttaggtaagacacttttttactgcttttatgtttttctgtcttgttttgagaccatgatggttacacttttggttcct |
| | a |
| 205518_s_at | tcaagaattcactgatctgatgcaaaataaaaatttatcattacatcttgaacccaggaagcttacagcaaagagactatgc |
| SEQ ID | tttatgacgtcagcaatagataattccacgttgcctttgtgatttgtatatatagcttacatttgtggaccactacatagcc |
| NO: 5 | agattcaaaaatattttacttgttccatccacagttctctacagaaagaaccaatgaacccaataggaacaaattctctgtg |
| | gaaaacaaagcatagctgtagtagatacgaatccaatcacagaggaaacaggaagagaaaaacatccaagactacagtgaaa |
| | actggaaatggtctgttttcgtgatattcgtatgattaagatgcaaattttttcttaggaaaatgtgattgttaactagcat |
| | tctgttttacatgttgacatttctaacacacacaccactgatttgaacttcaaaatttattttctgattatatatgctaggt |
| | ctgattctgaag |
| 206618_at | gaagcatatccagagggcgaaagatatctctccattgtgcatctgcctcttttgacgttggaagacacatgtcttactcccc |
| SEQ ID | aaagggagcccagcactgggagccttcttgatgatctcaaaaataatagctattcaagaaaatcaccaagtgactgtgaaac |
| NO: 6 | cgtcagttcggaaggctggttagaacatgtgggagcaacatgaatgttctacaaaagtttaaagcagagattgtttcaaatg |
| | ggtgtagtagatattactgaaaaccaaaaaagagtgagattgtcagtgtaagaatgtgatttaatgtttgtagtgcttacaa |
| | ttttgtgtaccaactggatgactaaaaagagtaaaataacttaattaatagctcatattttatgtgtgaaaacatgttagtg |
| | aacatatataatcaaaatagatttcattgctattgcatagtctc |
| 212684_at | gactatttcaaagctactgttcctagtccagctttaagtttcggtaagaaacatgctgttttgtttcatgatttcgttaatt |
| SEQ ID | atggaaatttggcattgagggattattttattgagggtagaagagattccagaatcatcatctgtgatgatggtgtccttta |
| NO: 7 | gggctcttggagcagccagaccatgtttccaagagaaacctggtgatattgccagcagaccccctgccatccccccnagttg |
| | tcctggggctgaatgggcaaatctgtccaaacagctagtaaccggctgtgagggagagggtcagaagcacttagcgttggcc |
| | tctgattgctgtcctctcttgtcctcttcccactccaatgatgaaaatgattttctctaaatgcctgggtaaggatgctttc |
| | aaggagctcacttggcctgctt |
| 212776_s_at | tctcctcgtggatcgtgtatcccagcggcaaggtgtatgtggcagcngtgcgcctggagcgtgtggtgctgacctgtgagct |
| SEQ ID | atgccggccctgggcagaggtgcgctggaccaaggatggagaggaggtggtggagagccccgcgctgctcctgcagaaggaa |
| NO: 8 | gacactgtccgccgcctggtgctgcccgctgtccagctcgaggactccggcgagtacttgtgtgaaattgacgatgagtcgg |
| | cctcctt |
| 215666_at | gaaaaatccgtggaactgaagctgagatctttagtacgtggagtcaccttacagatacagagcatttatgcggtattcattg |
| SEQ ID | gtgcctaaagaactttaggcatcctctggaaaaccggcc |
| NO: 9 | |
| 219551_at | gaacaggtgaccataactctgccaaatatagaaagttgaaggaagtagtaaaattcagtatcgtaaagaacaacagcaacaa |
| SEQ ID | caaatgtggaattcagccaggactcccaatcttgtaaaacattctccatctgaagataagatgtccccagcatctccaatag |
| NO: 10 | atgatatcgaaagagaactgaaggcagaagctagtctaatggaccagatgagtagttgtgatagttcatcagattccaaaag |
| | ttcatcatcttcaagtagtgaggatagttctagtgactcagaagatgaagattgcaaatcctctacttctgatacagggaat |
| | tgtgtctcaggacatcctaccatgacacagtacaggattcctgatatagatgccagtcataatagatttcgagacaacagtg |
| | gccttctgatgaatacttt |
| 220301_at | ataagtcatttctaatctttgtataaaacagaagtgagcaagatgaatcagaaaaaaggtgttttgtattttaaaggtaaca |
| SEQ ID | gataaccaggtgattgaatctaagacaggctgtaagcatcgctgagaaactaaaaggacttttgacttttatctggatagac |
| NO: 11 | atttctacagtaaaatcatggaaaggcatcagcattgcaaagtagcatctaggtagaaatcaggccaaaattaagctgtggt |
| | ttccctctgagtagtgggaatagagaaaattaggaaattgtggttatgtgaatatttctttaaaacttttatgtacattata |
| | gtttattgcttcatatttaagtttagtttttaaggtaaaatgttattttgaacaaaaagacacttataattttccataccta |
| | ttttcaactgaaggcaacttgtaagatttaactcagtcaataacatactggttttactcatc |
| 223095_at | tgcctgtagcattccagagctcactgcccttctagatgtgccttcccgcttggcttccagcggcttgtgctcactctgtctg |
| SEQ ID | ccaggtatgagaagaacacgtaagaccgccaccacactcaccctccctcaaggccctgtgccataggggtggccacccgacc |
| NO: 12 | tgcccccagaacttttggatactggaggcagttgcataggtctccctctctgggcaccaggactcagtccagcccaagacta |
| | ctctgggcagctcccatcccagtctggggccatttgcagactcaggaaaggatttctacagtgttctataaaagccaaaaga |
| | gagagtgggtttgggaagagtgagggtggttggggagaggggaccgatgtgcctcattgtttagtggtgattacaaatatgc |
| | ttttctggataaagtttggttgtttgc |
| 227927_at | tacctctgtcgacctgtgaaactgaacaaacagcttatctgcccctaatgtgaaatgatgggacagacatagaataacnact |
| SEQ ID | acagtgattctagttcaaaatgagggaacatggaggggataaagaagtcantaacccaaaatagtttggaaatggagctggg |
| NO: 13 | caaaatccagcaggagtttcttagttaggatccacagcctgggactgaccctctgtcctgtgggtctttgcctctgggctct |
| | ctgctctgcatttcttgaaaccattatta |
| 228128_x_at | gatgttgaaacctgtttggcaccttctggaagctaccaaaaaaatgacactccattgaagtgcttaaaagctgttctcataa |
| SEQ ID | gaattctactggcctattgtaaaaaagaaaaaaaaaangaaaaagaagaaagacacaaagaaaataatctaaacaccaaaaa |
| NO: 14 | ctaaacacaattccaatcctttttctgtacctcacgcgcataaattngctgctcctattttttttnctgttnatgtgttttn |
| | atggatctaagttaaatcttttggcaatatataaaaatgtaaatagtaaactttatttattaagaatgtcatcttttttaat |
| | ttatatttacacaattgttcatctaatttattttttctatacagttttaaatactcagacatattttgctgttcatgatatt |
| | tttatcctgttctcatggatttgttttcccatactgttttctctgatctcaattacaggttggatctcacaaataataatgt |
| | cagagacagaaatattttgccactgttgattactatac |
| 228812_at | gagacttcattggtgatacactcaatttttactgggtaattagctaataatgttggtcactgtctcacagttcaagtagctt |
| SEQ ID | taagatgatgtggcaaggaaaacacaaagcttttgggtaaccagcgttcttaaatgtatggtttttgaccaggtgaaccctt |
| NO: 15 | tagaagtgatttctgttttaaaagtatgtacttaaaatacctttggctgtgatgaatgtagatcccagcagaataccaaaat |
| | cctattttttttgactgagtatttgtagatgcttaatgactgaaatgaatttggaggcactgatgaaagtgatttttttnaa |
| | gttctcaggtactgttcaattat |
| 229022_at | gaaacacttttagagcacttgaggaacctaaaagatgactggttcagcattttgtgtggtagataagaaagaaattatcaca |
| SEQ ID | aaaaatcagaaatgaacagtgagagaaaaataggaccccagacagtttataccttccatttgctgttttaaaagtgtgagcc |
| NO: 16 | tgccaagtcaacaagtatgcctttagcgcacatgtaaatagcctgcacttcctaaatctcgtgtggcctcccatggttacat |
| | tcttcaaaggtnaactgagttgagaggaagattcagcatttaaaagagaagggttgaaaaagatnntgtgtgtgtgtgtgtg |
| | tgtgtttaattggcccagggttacttaaataaatcataaccattttgccacattctgtaactgtttagctaaggtcaaatta |
| | agtttaccctatggattttgtttcatcttttgtttcgtgtatatactgtttgcctttttca |
| 233976_at | tgagtcttttgaacacaggtatgaagtacaaagtgaatctaaaccaatgttacccctaccatacaggtatgttgtgttcaca |
| SEQ ID | aacacacacacacacacacacacaaattaaacatggtggaaatttttgacaaanttaaccacattaaatattctgtccatta |
| NO: 17 | agattccccaaagatggtgganngatngcagngttagtgngagaagatatttgcagcatgcaaggcaagatgacaatgcact |
| | aataacaaaatttcataaaacaatggacttggggcttgggaaaaataattatgacatgctttctgaagtgtccccagatagt |
| | ttcataaaaaatggagcaaataggctaaagaaaaacccatagacatcatgttcaaaagaactgatgacaaggcatgttcata |
| | acccataaaatacaagtggatgcagctaaataactgcaatacttttgaaagagtttggcaggtttcgaagatgtg |
| 244008_at | tacatttcacatttaccagcaagtcagtaaaaaatagtgcttatttacatagtcaatataatttaatgttctaaaaataata |
| SEQ ID | tcttcgatctgcccaatatttaatgtatcatttgagatttttaaaaatgcanccgctccattatgtaaacattaagatatgc |
| NO: 18 | ctatgtttctttaactatacagcctctttacaataaatttcttgatttttgtgcacaggatagtattgcaacctgctattta |
| | gcctttggtgccttagaattattataaatatttaacaatatgtacataatgtaaatactgccaagagatcagtaaggccaaa |
| | tattttctctattcactttttattgctcttgctttctattgctactaaagcctcttttatccagctttgtaatagttccaac |
| | attgtagcgaa |

TABLE 10
250 PS gene list, target sequences

| | |
|---|---|
| Probe Set ID | Target sequence |

| | |
|---|---|
| 1553555_at | gggtctccaggaagatctcccagatgctcctgggtattattctttgctcctgcatctgcactgtcctctgtgtttggtgctt |
| SEQ ID | ttttagcagacctcacttcacagtcacaactgtgctattcatgaataacaatacaaggctcaactggcagaataaagatctc |
| NO: 19 | aatttattttattcctttctcttctgctatctgtggtctgtgcctcctttcctattgtttctggtttcttctgggatgctga |
| | ctgtctccctgggaaggcacatgaggacaatgaaggtctataccagaaactctcgtgaccccagcctggaggcccacattaa |
| | agccctcaagtctcttgtctcctttttctgcttctttgtgatatcatcctgtgttgccttcatctctgtgcccctactgatt |
| | ctgtggcgcgacaaaataggggtgatggtttgtgttgggataatggcagcttgtccctctgggcatgcagccatcctgatct |
| | caggcaatgccaagttgaggagagctgtgatgaccattctgctctgg |
| 1554999_at | gtttacctagtattcatcaccctgcttgttttctctgtgttatgtcttggaaacccttccatgtcaatgtaggtagctgtat |
| SEQ ID | cttctttcagctgctatacagtagtccagtatgtgattgggccatgtttctttttctttttaaaaactattctattggacac |
| NO: 20 | aaacaagttaaatttgtttatactgaaaactcaggcgttttctgagaaagacttagcaaagaagattaagtcccttcttcat |
| | atcaaactctgtttagtaaagtagtaacatatagttgtgggttgctcttgtaaacaggctttactgactgtgaaacttcaac |
| | tttgtaacatgtattttctactctgcacttgatcttagccaaaagggtgagaagcgattctaccctggatagtatatgctgt |
| | aattaagtatctccaagaaggtgtttattagccattctgagta |
| 1556209_at | agattatggcctattgaacaaaatgtgaaactgggagtccacaaagacataaatggaaagatgaagtacctcctgacagagc |
| SEQ ID | aagaatggcactgaacaatgttatatggacaatggctattttattcaagactattacaatagggaaaagagactaggactca |
| NO: 21 | gtctgaactgaaatctgtcaaaacaaaggggggtggggctttaagagtgaaggtgaggaggagatcacacaccgtatgtgtt |
| | tgctaactggctttacccaaaagaaaattaaactttctttgatctgtacaagttgatcaaanaaannnnnnnannnnnnnna |
| | nannnaactaaaacagggtagacaggccaggggaaaaaggcactcagggcacacagcattgcttcaaaatataattctctac |
| | aaacctagttgctaaaactacctgttgtaacct |
| 1556341_s_at | aggctgtgctggacctggcttcatttctgctccaggatggcaggctgtgtcttcttcatggctgcatgaccagcctggggtg |
| SEQ ID | ggtgtgcccggggaaagtaggtgtacactgggagccgtgccatgtttcaggccctgtcctggctctgcctcgggtgcgggac |
| NO: 22 | cttggtcctccacactggctgggtggggctggatgggttgagattcacatgtgctccttacgaccacgggtccctgggtgcc |
| | cgcagcagggcctccacccttcgctgtgtgcatattcgtgtgcttatgagtt |
| 1557458_s_at | accctctccttgagtttctgtgaattaaaatatttgcaaatncanannnnnnnanannnnaaannnnnnnnnnnnnnnnnnn |
| | ncnactgatgctgggagccaaatgctggtgctttgagagtcccggaggccccggggttcccgccccgctggtgtgtatatgt |
| SEQ ID | gtgtctgtgtgagtgtgtgtgtgagtacagatgtgagaaggtggtcacacacagatgggtaagcccactgatctacttgtag |
| NO: 23 | tcactcagtgtaatcattaggctatcttcaaggaatcattgtgcagtcaaaa |
| 1558111_at | aaacagttgatggtgcactcgtagctgcaaaatgaaggacattaaatttggctgtgacattgagtggttacacagaagacct |
| SEQ ID | gcttctacaacatttggaaacattgtgaaacattactattcagttgctatttttccatctcaaaatattnttttttagttgc |
| NO: 24 | tgctcacttatggccacagaacagtccctttttgagtaaagcagcaaggntgcttaatnacatgctatgtggttaacaagat |
| | tcnactgccacntcaaggactttaaataatttcaagattttaaatgtatttatgaaatgaactcattacagcagctaatcaa |
| | tgcaaactttgt |
| 1561226_at | atctccctcagtgcctggcaatgtttgtggttggttgagtgagttaacaggagaccatcttttggccttttttctacctctg |
| SEQ ID | ttttctcttactatacttgcctacatctcatcttct |
| NO: 25 | |
| 1562031_at | atgttcactgtatgtgccaagcctaatatgagagctatgtattatagagtttatgctacagccctaccttcaggaaacttat |
| SEQ ID | ctactggacaaacaaaaattttcaaatatacaaaaaattctaaatcgaacattgtaattatctagcataggcaaatatagac |
| NO: 26 | agtaacagacaggtttacaattattaagaaagggcagccagg |
| 1562249_at | gatgactatctatgaacctaaggaggaaaagttaatttcttttgagggtttgcataatgttttaaaacaaatttatagaaat |
| SEQ ID | atagatgatggaaaaaagcaatagggtaaacctaaattanttaaaaataaataatacatnaggaaataaacagcatagaaaa |
| NO: 27 | gaaacaaaaaagagattgttaccaaaaacnataagtttttttttttttgaaaattctaagaaggtggataaatttctggaat |
| | tttcaatgagcaaaaaagtgaaaagatacaaatgaataaaaaatgaaaaggtagaaattaaaataggtctagtagagattaa |
| | aaataataaaagaatattattaaaaagtattggtggataaaataggcacatatctgaagataaaagccgaattgacccccta |
| | aaaagcagaaaacttacaataacaatcattaatggctttgaatggctatgaaaaaataatatctctgccctcttcactactc |
| | ccatgtaaaataattttacgggtagattttaccaacgtttcaagagagacatgattcccaaatattatgtaa |
| 1563497_at | taccatagcaagttcttatcctttgttaatatattataaatacgacttttttcctttacctgtcacagtaatatgccaattt |
| SEQ ID | ttggtgtcgctttagtaatttttttgggggggactgtcaaatttcagtaaactttataggctatagtttacaatttaaggtc |
| NO: 28 | tttcctcagttgtctcctaaaaaattttgtggaaatcgaaatttcttttcaattgatcgtcttgtgcagccctttaaaaaat |
| | gcgttttgcattcatgtctttgcagtacaaatctgtatctttcattttgggagtgactgtcatagatgggtaatataaagtg |
| | acaacacacacaccagggccagattgcgtgggttctagctagggacctagagctggttacttgatttctctctgttccattt |
| | actatctg |
| 1565544_at | gtagagttctctaaagggtcttgatattagtgggacataattagttctaaactaaatactgctctggtcctgcctaacaaat |
| SEQ ID | cacaaaagcaagatccaaaagaatcaaactgtttccaagtcacttaactatagtccagaaaaaaagctcaagaatattcata |
| NO: 29 | ggaatacaaaaatatccaatacccaaaaaggtaaaattcacaaagtctgccacaaagtctggcatccagttgagaactacca |
| | gacatacaaaaaagcagcagaaaaatataatctataataaagagaaaaatcaatcataaccacccagaactaacacagatat |
| | tagaattagcagataaaatggaaagttattatagctatattctatatagttaaaaaactagaggaaagctcaaagatagtaa |
| | gaagagacatgaaagataataaaaacccaaatcaaacnnnnnnaaatgaaaattatctgaggttaaaaaaatacactggata |
| | gaattaatggcaag |
| 1568752_s_at | agattaacattgacagttcgacaagagagactatcatcaggaacattcaggaacccactgaaacatgttttgaagaagctca |
| SEQ ID | gaaaatagtctatatgcatatggaaagggattcctaccccagatttctaaagtcagaaatgtaccaaaaacttttgaaaact |
| NO: 30 | atgcagtccaacaacagtttctgactacaactcaaaagtttaaatagaaaacagtatattgaaagtggtgggtttgatcttt |
| | ttatttagaaacccacaaaatcagaaacacagtacaaataaaacagaaatcaaactataagttgacttttagttcctaaaaa |
| | gaaacatatttcaaaagcaatggaatctagaattcttataacatgaataacaaaatgtacagcaagcctatgtagttcaat |
| 200924_s_at | acagcctatggaggctccagtcatgctgtgggatgagtccagcttccctgacatcccaggggctgtaagtgccaacatgact |
| SEQ ID | gtgaagggccagagtgaagaccctggctccctcctttccttgttccggcggctgagtgaccagcggagtaaggagcgctccc |
| NO: 31 | tactgcatggggacttccacgcgttctccgctgggcctggactcttctcctatatccgccactgggaccagaatgagcgttt |
| | tctggtagtgcttaactttggggatgtgggcctctcggctggactgcaggcctccgacctgcctgccagcgccagcctgcca |
| | gccaaggctgacctcctgctcagcacccagccaggccgtgaggagggctcccctcctgagctgggacgcctgaaactggagc |
| | ctcacgaagggctgct |
| 201008_s_at | gcaaaggggtttcctcgatttggagctttttttttcttccaccgtcatttctaactcttaaaaccaactcagttccatcatg |
| SEQ ID | gtgatgttcaagaagatcaagtcttttgaggtggtctttaacgaccctgaaaaggtgtacggcagtggcgagaaggtggctg |
| NO: 32 | gccgggtgatagtggaggtgtgtgaagttactcgtgtcaaagccgttaggatcctggcttgcggagtggctaaagtgctttg |
| | gatgcagggatcccagcagtgcaaacagacttcggagtacctgcgctatgaagacacgcttcttctggaagaccagccaaca |
| | ggtgagaatgagatggtgatcatgagacctggaaacaaatatgagtacaagttcggctttgagcttcctcaggggcctctgg |
| | gaacatccttcaaaggaaaatatgggtgtgtagactactgggtgaaggcttttcttgaccgcccgagccagccaactcaaga |
| | gacaaagaaaaactttgaagtagtggatctggtggatgtcaatacccctgattta |
| 201010_s_at | gtgttctcctactgcaaatattttcatatgggaggatggttttctcttcatgtaagtccttggaattgattctaaggtgatg |
| SEQ ID | ttcttagcactttaattcctgtcaaattttttgttctccccttctgccatcttaaatgtaagctgaaactggtctactgtgt |
| NO: 33 | ctctagggttaagccaaaagacaaaaaaaattttactacttttgagattgccccaatgtacagaattatataattctaacgc |
| | ttaaatcatgtgaaagggttgctgctgtcagccttgcccactgtgacttcaaacccaaggaggaactcttgatcaagatgcc |
| | caaccctgtgatcagaacctccaaatactgccatgagaaactagagggcaggtgttcataaaagccctttgaacccccttcc |
| | tgccctgtgttaggagatagggatattggcccctcactgcagctgccagcacttggtcagtcactctcagccatagcacttt |
| | gttcactgtcctgtgtcagagcactgagctccacccttttctgagagttat |
| 201087_at | atcaggactctgacgtctctttggtcttgttgatttacctctgggcatatcccttccccagatctgctcctcccctttcaca |
| SEQ ID | ggtgggatcggcactcagggggtctggaaagaaggtcataagggagcatgataggatttggggcagagggacaggctcctct |
| NO: 34 | ggggaaaccccccagagctctttaccaaggatgaaagaggagccaggccttgggctcctgatgaccagaaaggggccaccgg |
| | ggtctaatggtgacagtccaaaccactccactggcctcctggcagaagccgagtgtgctggggtctccgaagagggtccctc |
| | ctttttgggggaaggtcagcccagcccctccaaaggtctgatgtctccactttcacccgcaggccttaccgctctgtttata |
| | gtgacccaccctagatctt |
| 201115_at | cctaccaggccaccattgatggagtcagatttttggggacatcaggacagaacgtgagtgacattttccgatacagcagcat |
| SEQ ID | ggaggatcacttggagatcctggagtggaccctgcgggtccgtcacatcagccccacagccccggacactctaggttgttac |
| NO: 35 | cccttctacaaaactgacccgttcatcttcccagagtgcccgcatgtctacttttgtggcaacacccccagctttggctcca |
| | aaatcatccgaggtcctgaggaccagacagtgctgttggtgactgtccctgacttcagtgccacgcagaccgcctgccttgt |
| | gaacctgcgcagcctggcctgccagcccatcagcttctcgggcttcggggcagaggacgatgacctgggaggc |
| 201364_s_at | acatcgtccacttccagtatgaggtcaccgaggtgaaggtctcttcttgggatgcagtcctgtccagccagagcctgtttgt |
| SEQ ID | agaaatcccagatggattattagctgatgggagcaaagaaggattgttagcactgctagagtttgctgaagagaagatgaaa |
| NO: 36 | gtgaactatgtcttcatctgcttcaggaagggccgagaagacagagctccactcctgaagaccttcagcttcttgggctttg |
| | agattgtacgtccaggccatccctgtgtcccctctcggccagatgtgatgttcatggtttatcccctggaccagaacttgtc |
| | cgatgaggactaatagtcatagaggatgctttacccaagagccacagtgggggaagaggggaagttaggcagccctgggaca |
| | gacgagagggctcctcgctgtctagggaaggacactgaggggctcagggtgagggttgcctattgtgttctcgg |
| 201870_at | tgtcctgcccaagtgggctgcagactgagtgctgcccttgtagcttccccagaccccaactcactgcagttcatctgaacaa |
| SEQ ID | cctgagctcctgggccggggtggaaggagggggataaacctaaggccctgatccaaagcagcctgttgagctggttctccag |
| NO: 37 | ggctgcagtctctccaggtgtacagctgtccctgccctgtcctgtccttgcacagtctcctatgtctgagccccagtgcctt |
| | ctgttcgggccctcctttggtgggaaaggcagagccctgacccttgaatggttgtccttgactctgtgctgctgccttctgc |
| | agagaggcacctaagctgtttaaagagcccagtgattgtggctgctcctcctagaggtgggagggggcaagaggcctccttg |
| | gtcagtgtccatgctttctgggcagggacttggttttttgttccaacagtggccttctccgggcttcatagttctttgtaa |
| 201909_at | gacaggtgaacatttccgcctggtctatgacaccaagggccgttttgctgttcaccgcatcacagtggaagaggcaaagtac |
| SEQ ID | aagttgtgcaaagtgaggaagattactgtgggagtgaagggaatccctcacctggtgactcatgatgctcgaaccatccgct |
| NO: 38 | acccagatcctgtcatcaaggtgaacgatactgtgcagattgatttagggactggcaagataatcaactttatcaaatttga |
| | tacaggcaatttgtgtatggtgattggtggagccaacctcggtcgtgttggtgtgatcaccaacagggaaagacatcctggt |
| | tcttttgatgtggtgcatgtgaaggatgccaatggcaacagctttgccacgaggctttccaacatttttgtcattggcaatg |
| | gcaataaaccttggatttccctgcccaggggaaagggcattcgacttactgttgctgaagagagagataagaggctggccac |
| | caaaca |
| 201938_at | aaactgtagtttgcctccaagacaccattgtctccctttaatcttctcttttgtatacatttgttacccatggtgttctttg |
| SEQ ID | ttccttttcataagctaataccactgtagggattttgttttgaacgcatattgacagcacgctttacttagtagccggttcc |
| NO: 39 | catttgccatacaatgtaggttctgcttaatgtaacttcttttttgcttaagcatttgcatgactattagtgcttcaaagtc |
| | aatttttaaaaatgcacaagttataaatacagaagaaagagcaacccaccaaacctaacaaggacccccgaacactttcata |
| | ctaagactgtaagtagatctcagttctgcgtttattgtaagttgataaaaacatctggaagaaaatgactaaaactgtttgc |
| | atctttgtatgta |
| 201981_at | acagattgttctcaagagggccatcagaaggaagccaaagagttcacagcctcagcaccaacaactcaacatggtcatcatg |
| SEQ ID | ttttctatatggtttttccagctagcagtactcccttccatacctgtgactgggcagtgcttttctctctcccatgtctagc |
| NO: 40 | ctccaaaagttaagtgaaaattagtcaactgcacgtggaagnnccccaccactttggggatctctttatttcttttcagcca |
| | gggacctgtccactccctttgaattaatatgggaagaaattaatacaggatgaactggagagaagggttgagtgtggcatac |
| | tttctgaaacctggagctgggaattgcggagaagggaaggtctagactagttacatcacatag |
| 202290_at | agggctcatcgacatcgagaaccccaaccgggtggcacagacaaccaaaaaggtcacacaactggatctggacgggccaaag |
| SEQ ID | gagctttcgaggagagaacgagaagagattgagaagcagaaggcaaaagagcgttacatgaaaatgcacttggccgggaaga |
| NO: 41 | cagagcaagccaaggctgacctggcccggctggccatcatccggaaacagcgggaggaggctgcccggaagaaggaagagga |
| | aaggaaagcaaaagacgatgccacattgtcaggaaaacgaatgcagtcactctccctgaataagtaactgcgacccgtggga |
| | ggagatgccggggacctgggccgcgctgccaggacctctgctgtgtctcgcccaccctgtgccctggcgccgctgcaacagc |
| | ccctcatggccaggagccccccatgcctgggcctcctcttcatcttggcacagaaattgtttgggggatgggggggggactg |
| | ggggaggggtagctgctatctttgagacag |
| 202578_s_at | ctggtcacagtggtagtcgctggccccaggaccccctcctgattttggctaggcatcgtggaaccagctccagcccctgaag |
| SEQ ID | aaacgatagatgtgcaggttgtgcggaagaggctgagtggaaaatggtgtgagccccaccgctgtgcatcgaatgagggaag |
| NO: 42 | tggcagcagagaggccagagctgccccctctctgtctcttcaatggacccttcacaagtgtttctcctgcccttggggctgt |
| | cttccttctcctgaaatccagagactttcttgctcatcccttctccctttcacttctgttctctgctgcagaaagcagactt |
| | gcatatccctgatgagcagctcggctacttttgtaaactt |
| 202580_x_at | tcaattgacttctgttccttgcttttagttttgatagaagggaagacctgcagtgcacggtttcttccaggctgaggtacct |
| SEQ ID | ggatcttgggttcttcactgcagggacccagacaagtggatctgcttgccagagtcctttttgcccctccctgccacctccc |
| NO: 43 | cgtgtttccaagtcagctttcctgcaagaagaaatcctggttaaaaaagtcttttgtattgggtcaggagttgaatttgggg |
| | tgggaggatggatgcaactgaagcagagtgtgggtgcccagatgtgcgctattagatgtttctctgataatgtccccaatca |
| | taccagggagactggcattgacgagaactcaggtggaggcttgagaaggccgaaagggcccctgacctgcctggcttcctta |
| | gcttgcccctcagctttgcaaagagccaccctaggccccagctgaccgcatgggtgtgagcc |
| 202727_s_at | aagcgtaaagaggatgtgtggcattttcacttttggcttgtaaagtacagacttttttttttttttaaacaaaaaaagcatt |
| SEQ ID | gtaacttatgaacctttacatccagataggttaccagtaacggaacatatccagtactcctggttcctaggtgagcaggtga |
| NO: 44 | tgccccagggacctttgtagccacttcactttttttcttttctctgccttggtatagcatatgtgttttgtaagtttatgca |
| | tacagtaatttt |
| 202948_at | ggcagctggaatttaaggagggacaagaatcaatggataagcgtgggtggaggaagatccaaacagaaaagtgcaaagttat |
| SEQ ID | tccccatcttccaagggttgaattctggaggaagaagacacattcctagttccccgtgaacttcctttgacttattgtcccc |
| NO: 45 | actaaaacaaaacaaaaaacttttaatgccttccacattaattagattttcttgcagtttttttatggcatttttttaaaga |
| | tgccctaagtgttgaagaagagtttgcaaatgcaacaaaaatatttaattaccggttgttaaaactggtttagcacaattta |
| | tattttccctctcttgcctttcttatttgcaataaaaggtattgagccattttttaaatgacatttttgataaattatgttt |
| | gtactagttgatgaaggagttttttttaacctgtttatataattttgcagcagaagccaaattttttgtatattaaagcacc |
| | aaattcatgtacagcatgcatcacggatcaatagactgtact |
| 203071_at | gcccctggagtcgcggagaaagggccgtaaccggaggacccacgcccctgagcctcgcgctgagcgggggccgcgcagcgca |
| SEQ ID | acgcactggtgaccagactgtccccacgccgggaaccaagcaggagacgacaggcgagagaggagccagacagaccctgaaa |
| NO: 46 | agaaggacgggttggggccgggcacattgggggtcaccggccgatggagacaccaaccgacaggccctggctgagggcagct |
| | gcgcgggcttatttattaacaggataacccttgaatgtagcagccccgggagggcggcacaggtcgggcgcaggattcagcc |
| | ggagggaagggacggggaagccgagctccagagcaacgaccagggccgaggaggtgcctggagtgcccaccctgggagacag |
| | accccacctccttgggtagtgagcagtg |
| 203577_at | attaccgactgtatgcctacacggagtcggagctgcagattgccctcattgccctcttctctgagatgctctatcggttccc |
| SEQ ID | caacatggtggtggcgcaggtgacccgggagagtgtgcagcaggcaatcgccagtggcatcacagcccagcagataatccat |
| NO: 47 | ttcctaaggacaagagcccacccagtgatgctcaaacagacacctgtgctgccccccaccatcaccgaccagatccggctct |
| | gggagctggaaagggacagactccggttcactgagggtgtcctgtataaccagttcctgtcgcaagtggactttgagctgct |
| | gctggcccacgcgcgggagctgggcgtgctcgtgttcgagaactcggccaagcggctcatggtggtgaccccggccgggcac |
| | agcgacgtcaagcgcttttggaagcggcagaaacatagctcctgagagcgcgggacttggac |
| 203642_s_at | cacttagtgtgaaagacttgccttgtgtattctttatgtaattacaaatcactgtcaattttatgggaagctcatagtattt |
| SEQ ID | taatattttattaacatggaactcttgtttttttaatctttagaacttaaattctacaagaattttaaatattttctgtata |
| NO: 48 | taattatgacattgtcacacagaaattacacattttatgtgccagaagccttaaacatctttctgtgaaaatgctgatatat |
| | tgtgacagttatttcacatttgatatgtagagaggaataggggttagtttatgtttatattgaaaaactttaaagactattt |
| | ggaagttccagaaattctggttttaattcaagtaaaatgataaaatagtcattatatagttcagatgctaatattctaagta |
| | ataatatatatttacattgaagctaaaactgttaagcaaaacaatgcccatttgtcggcttacagctcttccggagtctaga |
| | gcctgttggtgttctgtccctactttaagaatttaattgctcacttattctgaa |
| 203679_at | gcgcttcttccaggacaagcgcccggtgcccacgtagcccctgccatggaaggaagaacgggacaaaggaggggcagcaggg |
| SEQ ID | tgtgtgcatatgagacttgggggtccctccccaattttagtttcctgccaaaacgggagtgtgcagtcagggcctgcggtct |
| NO: 49 | ggccccatgagtctccttccgtcctcagcgggcagggaacacctctggcttgtagaagggacggctcagtggctgcaccgac |
| | ggtcctggaaatctcacatggtgggcactgcagcgttggaacgtgagcctcggatttcctggcccctctactgtaaatgtgc |
| | cttagcctaagcctcccatcctgtgttagcgttgcctggtgcggggcagggcctaacaaggaaacctgggccctccaagcca |
| | ggttgaggtctggtaacagaatgccaggaagggggcctggaagaccacctgccccggcccctctcctgcaggggccccacac |
| | aggcatgagggatggcccggccaaagtctaggcagaa |
| 203756_at | tggggacctgtcaggctttgtcatttcccagtttgttggtggtgcctttagtggttccctaatttgggaacactgatggggc |
| SEQ ID | cttggacagggctttctctcaggtaggagaaatgggcccatgatctcctcacagtcgcccccagtccttggccctgcttccc |
| NO: 50 | tgtgtctcatgcactggcacatatggtcaccttggagggcagacctaggagcccctctgaccactgaatccgtctccacacc |
| | ccttctgccaagggaagccccttcaggaaggaccccccaaagctgaggggctgaatgtagccttttcaacagagaaggctcc |
| | cacttgagagcagcctctacctgaccccctggaccacagagagccactctgaccctcagccccctcgcttcttcagctaaaa |
| | ctccaaaggtttggtttcagatggggtttgttttgttctgtttggttttggttttgtttggggtgggtgggtcattgcggtc |
| | ttagattat |
| 203793_x_at | taggcatgattccaactggctgcatataggagtcagttagaattgtttctttctctccccgtttctctccccatcttggctg |
| SEQ ID | ctgtcctgcctctgaccagtggccgccccccgcgttgttgaatgtccagaaattgctaagaacagtgccttttacaaatgca |
| NO: 51 | gtttatccctggttctgaggagcaagtgcagggtggaggtggcacctgcatcacctcctcctcttgcagtggaaactttgtg |
| | caaagaatagatagttctgcctcttttttttttttttcctgtgtgtgtggcctttgcatcatttatcttgtggaaaagaaga |
| | ttcaggccctgagaggtctcagctcttggaggagggctaaggctttagcattgtgaagcgctgcacccccaccaaccttacc |
| | ctcaccggggaaccctcactagcaggactggtggtggagtctcacctggggcctagagtggaagtgggggtgggttaacctc |
| | acacaagcacagatcccagactttgccagaggcaaacagggaattccgccgata |
| 203967_at | taatatctttgggtcttactatttttacccataaaagtgaccaggtagaccctttttaattacattcactacttctaccact |
| SEQ ID | tgtgtatctctagccaatgtgcttgcaagtgtacagatctgtgtagaggaatgtgtgtatatttacctcttcgtttgctcaa |
| NO: 52 | acatgagtgggtatttttttgtttgttttttttgttgttgttgtttttgaggcgcgtctcaccctgttgcccaggctggagt |
| | gcaatggcgcgttctctgctcactacagcacccgcttcccaggttgaagtgattctcttgcctcagcctcccgagtagctgg |
| | gattacaggtgcccaccaccgcgcccagctaattttttaatttttagtagagacagggttttaccatgttggccaggctggt |
| | cttgaactcctgaccctcaagtgatctgcccaccttggcctccctaagtgctgggattataggcgtgagccaccatgctcag |
| | ccattaaggtattttg |
| 203992_s_at | aggaaataacccagttctgcaccactggtttttgtagctatctcgtaaggctgctggctgaaaactgtgtctatgcaacctt |
| SEQ ID | ccaagtgcggagtgtcaaccaactggacgggagagagtactgctcctactccaggactctcacaaagctgatgagctgtact |
| NO: 53 | tcagaaaaaaataataatttccatgttttgtatatatctgacaaaactggcaacatcttacagactactgacttgaagacaa |
| | cctcttttatatttctctatttctgggctgatgaatttgttttcatctgtcttttcccccttcagaattttccttggaaaaa |
| | aaatactagcctagctggtcatttctttgtaaggtagttagcaattttaagtctttctttggtcaacttttttttaatgtga |
| | aaagttaggtaagacacttttttactgcttttatgtttttctgtcttgttttgagaccatgatggttacacttttggttcct |
| | a |
| 204078_at | aacttaagatggacacagctgactggacccccatcctgcctcacccatgggtgctgcaccccagacccatcctgccacttct |
| SEQ ID | atgtctctggaccacaggatggtggtggcattgcaggttggcaagtgggctgatggggtccgccctcctcactgctgagctc |
| NO: 54 | ctcacctggacagtctcctggacaaggagtttccagctgctggctggagtctcaggccaaattgcagagggtcctccagggt |
| | cctgaagagcactggactaagagtctagtggttccagggc |
| 204233_s_at | gcaaacatccggaagtatcccaccaagaaacaacagctccattttatttccagttacttgcctgcattccaaaatgactttg |
| SEQ ID | aaaacctcagtactgaagaaaaatccattataaaagaagaaatgttgcttgaagttaataggtttgcccttgcatctcattt |
| NO: 55 | cctctggggactgtggtccattgtacaagccaagatttcatctattgaatttgggtacatggactacgcccaagcaaggttt |
| | gatgcctatttccaccagaagaggaagcttggggtgtgactgtggggaggactccatccacctcatcactggactgcatggg |
| | gaggcagcagagcggggtcccctctgtgcttcgactactgctcctgtggcaggaggctttgggtggctcactactgaacaca |
| 204409_s_at | aggttatgccatatcagagggaaattgagaaaaaaggtttggataaatacatcagacattatattggttggtctacgggact |
| SEQ ID | atcaggataacaaagctgatgtaattttaaagtacaatgcagatgaagctagaagcctgaaggcatatggcgagcttccaga |
| NO: 56 | acatgctaaaatcaatgaaacagacacatttggtcctggagatgatgatgaaatccagtttgacgatattggagatgatgat |
| | gaagacattgatgatatctaaattgaaccaagtgtttttacatgacaagttctctgaggatggttctacagttgggattttg |
| | gccatcatcaaccaagaagagaaattcatttagtgtgtagtttctgaaagcaaactgatttattttcattgttttaaagtat |
| | ttatttctttaaaagctgaggacactgaattaccttaagttaaatgttaatactttattgttttgatgtaatggaacttaag |
| | gataaaagaccataatatttgctgttaaaataaataaacgagtgcctttcctactgt |
| 204410_at | cctttcctactgtgataacgtcaagtaattggatattttgaatacatttctgcctgataatcatgctgagttctaataagcc |
| SEQ ID | ctacttccacctaatctgtttacagtcttttggtatgtttcagttacttagatggtctcataaggtttctgatacaatttga |
| NO: 57 | agacagaaatctgcatttagaatcagaaaacatggacatatttttcatatttatctagtcatatgtaattttatgctaacat |
| | tgatagtttataaatccttttcatcctttgtgcctcggttattaaggaaaaaaaaatgtccaacatacagtttttaaagtgt |
| | ggcagttttgagtagtaacttagaatgtataagattaagagttaaagaaaccgaacaataagtggcaaccaattatcttaac |
| | attggaaatactggggtgccattttgttttcaaaagttattcattgtaatccactgttttggctttca |
| 204434_at | aatcttctatggctctctttttaatatatatatatatatatatatatatatatatatatatatatatatatctatctggtag |
| SEQ ID | atcacatgtagatgtacagtgtgtatattaagctgaatttcaaccaactttattactaagaccagcctagcagggcattcat |
| NO: 58 | ctttgatgttcttccttttcacatttcagaatcggcaatgcctggcccactcctgagagctctagttttctagttttccatt |
| | tccagattgcgccagcattacagtaactaactctttctaaccaaccgtgatgccacgtaacttaccctatggacaaaagcag |
| | gaatgactaacacatcctaggagggaaagtccagtgtacctgtcatcacggacgcactgtggtcacagactggaatacgaaa |
| | tactacagccctgctcccaggtgtgcatcttactgg |
| 204724_s_at | caccagcaaggacggccaggacggtgctcccggcgagcctgggcctcccggagatcctgggcttccaggtgccattggggcc |
| SEQ ID | caggggacaccggggatctgcgacacctcagcctgccaaggagccgtgttaggaggggtcggggagaaatcaggctctcgaa |
| NO: 59 | gctcataaaattcaacgtgaggaagcaagtgacaaggacgcccgaagcacagtggacggtcatgaaggagcgggggtgtggc |
| | aggcgggtgacgtccaggagagggagcgcccctggctgcccctcggccgccgactggacgcgtgggccttgccagcgagcac |
| | cctcattgggctgtcgcctgacagcatacctcaaaaggccctagctaataaacctgtaagcccagcatttgagagaaggtag |
| | ggtgtgtatatataaaaggttgtgtacaactccacgaggtgaaaaatattcagtaacttgtttgcatagcatttgtgtaaag |
| | actatgatctcatcccaata |
| 204778_x_at | ccggctatgggctcgagccgagttccttcaacatgcactgcgcgccctttgagcagaacctctccggggtgtgtcccggcga |
| SEQ ID | ctccgccaaggcggcgggcgccaaggagcagagggactcggacttggcggccgagagtaacttccggatctacccctggatg |
| NO: 60 | cgaagctcaggaactgaccgcaaacgaggccgccagacctacacccgctaccagaccctggagctggagaaagaatttcact |
| | acaatcgctacctgacgcggcggcggcgcatcgagatcgcgcacacgctctgcctcacggaaagacagatcaagatttggtt |
| | tcagaaccggcgcatgaagtggaaaaaggagaacaagaccgcgggcccggggaccaccggccaagacagggctgaagcagag |
| | gaggaagaggaagagtgagggatggagaaagggcagaggaagagacatgagaaagggagaggaagagaagcccagctctggg |
| | aactgaatcagg |
| 204897_at | agcagcttattgtttctctgaaagtgtgtgtagttttactttcctaaggaattaccaagaatatcctttaaaatttaaaagg |
| SEQ ID | atggcaagttgcatcagaaagctttattttgagatgtaaaaagattcccaaacgtggttacattagccattcatgtatgtca |
| NO: 61 | gaagtgcagaattggggcacttaatggtcaccttgtaacagttttgtgtaactcccagtgatgctgtacacatatttgaagg |
| | gtctttctcaaagaaatattaagcatgttttgttgctcagtgtttttgtgaattgcttggttgtaattaaattctgagcctg |
| | atattgatatg |
| 204921_at | gcccactgcctaaatgatgcccggccagcaggacctggcctgcagatcccagtgagtcatgagcctcagccccctccagccc |
| SEQ ID | actggggctctcacctccacatgtgggtagaagctttcctgccccctcttcctctagtagccctcagtgtcgaaggtgagct |
| NO: 62 | tgtaggtgcctgccttcatctggtccaggacagtgaccatctgggtctgtgtagctggggagagaatgaggctgcagagatg |
| | gggaccagaagccccccaccccagctttcctgggtctgcatcccagtgggcctcagacactgccctgccacctgtcagactt |
| | gggtgagcagacacagtgaggctgttaggtcctgcagttccagagcagtctagggacaccactgccctgtctttaggaaatc |
| 204947_at | ctggctgggcgtgtaggacggtgagagcacttctgtcttaaaggttttttctgattgaagctttaatggagcgttatttatt |
| SEQ ID | tatcgaggcctctttggtgagcctggggaatcagcaaaaggggaggaggggtgtggggttgataccccaactccctctaccc |
| NO: 63 | ttgagcaagggcaggggtccctgagctgttcttctgccccatactgaaggaactgaggcctgggtgatttatttattgggaa |
| | agtgagggagggagacagactgactgacagccatgggtggtcagatggtggggtgggccctctccagggggccagttcaggg |
| | cccagctgccccccaggatggatatgagatgggagaggtgagtgggggaccttcactgatgtgggcaggaggggtggtgaag |
| | gcctcccccagcccagaccctgtggtccctcctgcagtgtctgaagcgcctgcctccccactgctctgccccaccctccaat |
| | ctgcactttgatttgcttcctaacagctctgtt |
| 205000_at | taagcagacccggcattggcaatgtagctgtaattttctgacaaaatttaagacaaaattgtcaacttgaaactaaaacatg |
| SEQ ID | ccaaggttttgatatacttgtcttaagatattaatgaaacaattttgaacactgataggaaggtccacatccacaaagtttc |
| NO: 64 | tcttgagttttgttatgtgttttgctgtgtttgattttcagtgattgtctggtatatttacagtcctcaaacatggttattt |
| | ctgtcagtgacttaacattcggttttaccagccagcagtattcttcagtaaataaagaatggaattgctgaatgtaatcatt |
| | gaacctcgagtcactgtaaaagttcagtaattgcttattgtattagttttagatgctggcaccgcatgtgctctgtttattc |
| 205001_s_at | agaagtgccttcttggttggaaaatatggcttatgaacaccactacaagggtggcagtcgtggacgatctaaaagtaataga |
| SEQ ID | ttcagtggaggatttggtgccagagactatcgacaaagtagtggttccagcagttccggctttggtgctagtcgcggaagca |
| NO: 65 | gcagccgcagtggtggaggtggttacggcgacagcagaggatttggtggaggtggctatggaggcttctacaatagtgatgg |
| | atatggaggaaattataactcccagggggttgactggtggggcaactgaatctgctttgcagcaaagtcacccttacaaaga |
| | agctaatatggaaaccacatgtaacttagccagactatattgtgtagcttcaagaacttgcagtacattaccagctgtgatt |
| | ctcctgataattcaagggagctcaaagtcacaagaagaaaaatgaaaggaaaaaacagcagccctattcagaaattggtttg |
| | aagatgtaattgctctagtttggatt |
| 205027_s_at | attatataactctttgagcctttattggtaaattctggtatacattgaattcattataatttgggtgactagaacaacttga |
| SEQ ID | agattgtagcaataagctggactagtgtcctaaaaatggctaactgatgaattagaagccatctgacagacggccactagtg |
| NO: 66 | acagtttcttttgtgttcctatggaaacattttatactgtacatgctatgctgaagacattcaaaacgtgatgttttgaatg |
| | tggataaaactgtgtaaaccacataattttgtacatccaaggatgaggtgtgacctttaagaaaaatgaaaacttttgtaaa |
| | ttattgatgattttgtaattcttatgactaaattttcttttaagcatttgtatattaaaatagcatactgtgtatgttttat |
| | atcaaatgccttcatgaatctttcatacatatatatatttgtaacatgtaaagtatgtgagtagtcttatgtaaagtatgtt |
| | tttacattatgcaaataaaacccaatacttttgtccaatgtggttggtcaa |
| 205105_at | acttcttctctcatgaatcatccagtcattccaatggcaaataagttctcacctacccttgagctgcaaggtgaattctctc |
| SEQ ID | cattacagtcatctttgccttgtgacattcatctggttaatttgagaacaatacagtcaaaggtgggcaatgggcactccaa |
| NO: 67 | tgaggcagccttgatcctccacagaaaagggtttgattgtcggttctctagcaaaggcacagggctgttttgttctactact |
| | cagggaaagatattggtacagaaacttttaaacaagtttattgtcgaaagtctcacaccttcatcactatccttgatgcatt |
| | cacctcccggcactcagaatataagtgagatcaacttgagtccaatggaaatcagcacattccgaatccagttgaggtgaac |
| | ctgactttcacatttggattgagaatcattggcttttatacctttcttggt |
| 205204_at | agatccgagtgcactcgcgaggcaacctctgggccaccggtcacttcatgggcaagaagagtctggagccttccagcccatc |
| SEQ ID | ccattggggacagctccccacacctcccctgagggaccagcgactgcagctgagtcatgatctgctcggaatcctcctgcta |
| NO: 68 | aagaaggctctgggcgtgagcctcagccgccccgcaccccaaatccagtacaggaggctgctggtacaaatactgcagaaat |
| | gacaccaataataggggcagacacaacagcgtggcttagattgtgcccacccagggaaggtgctgaatgggaccctgttgat |
| | ggccccatctggatgtaaatcctgagctcaaatctctgttactccattactgtga |
| 205419_at | cagcccctgaagaaaattcacgtgaaatgacagaaacgcagatgatgatacattccaagtcttcaaatggaaagtgaaatgg |
| SEQ ID | attgtattttggtttatagtgacgtaaactgtatgacaaactttgcaggacttcccttataaagcaaaataattgttcagct |
| NO: 69 | tccaattagtattcttttatatttctttcattgggcgctttcccatctccaactcggaagtaagcccaagagaacaacataa |
| | agcaaacaacataaagcacaataaaaatgcaaataaatattttcatttttatttgtaaacgaatacaccaaaaggaggcgct |
| | cttaataactcccaatgtaaaaagttttgttttaataaaaaattaattattattcttgccaacaaatggctagaaaggactg |
| | aatagattatatattgccagatgttaatactgtaacatactttttaaataacatatttcttaaatccaaatttctctcaatg |
| | ttagatttaattccctcaataacaccaa |
| 205421_at | caattcctattcattcttagcactttgacatgtcttggggaaaagctttacattttaatttaaaagaaagatcaattatatc |
| SEQ ID | catgcttaacaggatcagcaggagctttataaatgactttacagagactaataagggattgatctttctttttttgttatcg |
| NO: 70 | aggcttttgaaatgtggaacttgtgtgttctgctttatatgttatattcaatatcttttcagatgcagtctatattttatgc |
| | tgagttttaaaaatgaaatactttatgcaaacaggcaaaattggtaccaaagggaaacattaaccatgaggaagagcatttt |
| | tctaaggagaacaggtgacaatatacacatgtcgcgtaatcgtaaaatgagcatcttagtctttaaaacaca |
| 205447_s_at | gccgtcacccgaagtcagaaacgtggcatctcatcggaagaggaggaaggagaggtagacagtgaagtagagctgacatcaa |
| SEQ ID | gccagaggtggcctcagagcctgaacatgcgccagtcactatctaccttcagctcagagaatccatcagatggggaggaagg |
| NO: 71 | cacagctagtgaaccttcccccagtggcacacctgaagttggcagcaccaacactgatgagcggccagatgagcggtctgat |
| | gacatgtgctcccagggctcagaaatcccactggacccacctccttcagaggtcatccctggccctgaacccagctccctgc |
| | ccattccacaccaggaacttctcagagagcggggccctcccaattctgaggactcagactgtgacagcactgaattggacaa |
| | ctccaacagcgttgatgccttgcggcccccagcttccctccctccatgaaagccactcgtattccttgtac |
| 205518_s_at | tcaagaattcactgatctgatgcaaaataaaaatttatcattacatcttgaacccaggaagcttacagcaaagagactatgc |
| SEQ ID | tttatgacgtcagcaatagataattccacgttgcctttgtgatttgtatatatagcttacatttgtggaccactacatagcc |
| NO: 72 | agattcaaaaatattttacttgttccatccacagttctctacagaaagaaccaatgaacccaataggaacaaattctctgtg |
| | gaaaacaaagcatagctgtagtagatacgaatccaatcacagaggaaacaggaagagaaaaacatccaagactacagtgaaa |
| | actggaaatggtctgttttcgtgatattcgtatgattaagatgcaaattttttcttaggaaaatgtgattgttaactagcat |
| | tctgttttacatgttgacatttctaacacacacaccactgatttgaacttcaaaatttattttctgattatatatgctaggt |
| | ctgattctgaag |
| 205668_at | ggaactctaaaccttgtgatgactactaacaaatgtaaaattatgagtgattaagaaaacattgctttgtggttatcacttt |
| SEQ ID | aagttttgacacctagattatagtcttagtaatagcatccactggaaaaggtgaaaatgttttattcagcatttaacttaca |
| NO: 73 | tttgtactttagagtatttttgtataaaatccatagatttattttacatttagagtatttacactatgataaagttgtaaat |
| | aattttctaagacagtttttatatagtctacagttgtcctgatttcttattgaatttgttagactagttctcttgtcttgtg |
| | atctgtgtacaattttagtcactaagactttcctccaagaactaagccaacttgatgtgaaaagcacggctgtatataatgg |
| | tgatgtca |
| 205841_at | atctattttattatggtttcccttgtatctatttgtggtgaatgtgttttttaaatggaactatctccaaatttttctaaga |
| SEQ ID | ctactatgaacagttttcttttaaaattttgagattaagaatgccaggaatattgtcatcctttgagctgctgactgccaat |
| NO: 74 | aacattcttcgatctctgggatttatgctcatgaactaaatttaagcttaagccataaaatagattagattgttttttaaaa |
| | atggatagctcattaagaagtgcagcaggttaagaattttttcctaaagactgtatatttgaggggtttcagaattttgcat |
| | tgcagtcatagaagagatttatttcctttttagaggggaaatgaggtaaataagtaaaaaagtatgcttgttaattttattc |
| | aagaatgccagtagaaaattcataacgtgtatctttaa |
| 205856_at | gaaatactcagcttaggcatttttactttaacccctaaattgattttgtaaatgccacaaatgcatagaattgttaccaacc |
| SEQ ID | tccaaagggctctttaaaatcatatttttttattcatttgaggatgtcttataaagactgaaggcaaaggtcagaatgctta |
| NO: 75 | cgggtgttatttttataagttgttgaattccttaatttagaaaagctcattattttttgcacactcacaatattctctctca |
| | gaaatcaatggcatttgaaccaccaaaaa |
| 205987_at | ccagctgttgctggtttgtcatgcctccggcttctacccaaagcctgtttgggtgacatggatgcggaatgaacaggagcaa |
| SEQ ID | ctgggcactaaacatggtgatattcttcctaatgctgatgggacatggtatcttcaggtgatcctggaggtggcatctgagg |
| NO: 76 | agcctgctggcctgtcttgtcgagtgagacacagcagtctaggaggccaggacatcatcctctactggggacaccactcttc |
| | catgaattggattgccttggtagtgatagtgcccttggtgattctaatagtccttgtgttatggtttaagaagcactgctca |
| | tatcaggacatcctgtgagactcttccccctgactcccccattgtgttaagaacccagcaacccaggagcctagtacaatat |
| | agtgatgccatcccgtcgactctccatttaaattgtt |
| 205997_at | gatggtaaaggctgttcaaccccaagagatgagtcagatgaagccccatgtgtatgatctgccagtagaaggcaatgagccc |
| SEQ ID | ccagcctcttttcataaagacacaaacgcacttccccctactgttttcaaggataatccaatgtctacacctaaggactcaa |
| NO: 77 | atccagaagcatgaagcaacagctaagcaagaactaatggttaaattatcaacttggaaaacttggaaaatctggatgccag |
| | agaaatatactatctcaccagtatttgctctcgactcaagaaggttaacattttctgattcatgttagactttgaagagact |
| | aaagaaaattttcaagaggaacatatgcctgagaacctttgca |
| 206118_at | gctgacatcctgcgagactacaaagttattatggctgaaaacattcctgaaaaccctctgaagtacctatatcctgacattc |
| SEQ ID | ccaaagacaaagccttcggtaaacactacagctctcagccttgcgaagtttcaagaccaacagaaaggggtgacaaaggtta |
| NO: 78 | tgttccttctgtttttatccccatctcaacaatccgaagtgattcaacagagccacattctccatcagaccttcttcccatg |
| | tctccaagtgtgtatgcggtgttgagagaaaacctgagtcccacaacaattgaaactgcaatgaagtctccttattctgctg |
| | aatgacaggataaactctgacgcaccaagaaaggaagcaaatgaaaaagtttaaagactgttctttgcccaataaccacatt |
| | ttatttcttcagctttgtaaataccaggttctaggaaatgtttgacatctgaagctctcttcacactcccgtggcactcctc |
| | aattgggag |
| 206618_at | gaagcatatccagagggcgaaagatatctctccattgtgcatctgcctcttttgacgttggaagacacatgtcttactcccc |
| SEQ ID | aaagggagcccagcactgggagccttcttgatgatctcaaaaataatagctattcaagaaaatcaccaagtgactgtgaaac |
| NO: 79 | cgtcagttcggaaggctggttagaacatgtgggagcaacatgaatgttctacaaaagtttaaagcagagattgtttcaaatg |
| | ggtgtagtagatattactgaaaaccaaaaaagagtgagattgtcagtgtaagaatgtgatttaatgtttgtagtgcttacaa |
| | ttttgtgtaccaactggatgactaaaaagagtaaaataacttaattaatagctcatattttatgtgtgaaaacatgttagtg |
| | aacatatataatcaaaatagatttcattgctattgcatagtctc |
| 206637_at | tgagcctggggttctggtgttagaatatttttaagtaggctttactgagagaaactaaatattggcatacgttatcagcaac |
| SEQ ID | ttcccctgttcaatagtatgggaaaaataagatgactgggaaaaagacacacccacaccgtagaacatatattaatctactg |
| NO: 80 | gcgaatgggaaaggagaccattttcttagaaagcaaataaacttgatttttttaaatctaaaatttacattaatgagtgcaa |
| | aataacacataaaatgaaaattcacacatcacatttttctggaaaacagacggattttacttctggagacatggcatacggt |
| | tactgacttatgagctaccaaaactaaattctttctctgctattaactggctagaagacattcatctatttttcaaatgttc |
| | tttcaaaacatttttataagtaatgtttgtatctatttcatgctttact |
| 206700_s_at | tcttaaatcctactatctcctggcctggacctcagaaggagctttttgcctatctataatttttcactgccaatttttgata |
| SEQ ID | tcctctctcctagagttactgttaaaaggttggttcgtaaagtccacaccccgatgctcagaagtgtcttgccagcaacatt |
| NO: 81 | cctgctagcatacaggagtgatttcctaaaccagtttcattctagtctgaatagggacaaacaaatcttgaggaagcccaag |
| | tgcgtacctttatttttgcccccaccaccctctttctgtacttcaatttttgtttgttttttgtttttttgtccctgtcata |
| | aaatattttggtgcttcaaaacttgtaccttcattgtacatccttttcttttctccccttgggtcttattataaaagaagac |
| | aatgtacgttgtaattaccaaaaagaatagggaaaaacaagaatttcatgactctacctgtggtctatcttt |
| 207063_at | tgttgggaattggtactggctagaaatttctgttgagtatttattaccccatggtaataatggtaaaccacagtttagaaag |
| SEQ ID | attttttttgacagccacagcatgttccgaagagatgattggaagatggaagtggagggttaaataatgaaatgcagctaac |
| NO: 82 | atttcggaaagtttctaaaagttgtacaacatgccctacagctactctttaaatctccaaatcaaatgagtttcaggtggag |
| | cctctgggaggtgatgaggtcatgagagtggagcctcatgaatgggatgagcactcctacaaaaaggattccagagagctcg |
| | cttgctccttccacagtgtgaggacacagagggaaggctctgtctatgaatgagaaagtgggtccccaccagacattgaatc |
| | tgccgcatcttgatactggacttccagtctccagaactgtgggcaataaatgtctgttgtttattacctgtccagtatcttt |
| | ggtattttgctatagcaacccaaatggactaagaaaacaccagaggccatacctaat |
| 207651_at | ttgccttgtaattcgacagctctacagaaacaaagataatgaaaattacccaaatgtgaaaaaggctctcatcaacatactt |
| SEQ ID | ttagtgaccacgggctacatcatatgctttgttccttaccacattgtccgaatcccgtataccctcagccagacagaagtca |
| NO: 83 | taactgattgctcaaccaggatttcactcttcaaagccaaagaggctacactgctcctggctgtgtcgaacctgtgctttga |
| | tcctatcctgtactatcacctctcaaaagcattccgctcaaaggtcactgagacttttgcctcacctaaagagaccaaggct |
| | cagaaagaaaaattaagatgtgaaaataatgcataaaagacaggattttttgtgctaccaattctggccttactgga |
| 207714_s_at | gacacatgggtgctattggggttgggggggaggtgaggtaccagccttggatactccatggaattcgagctccacttggaca |
| SEQ ID | tgggccccagataccatgatgctgagcccggaaactccacatcctgtgggacctgggccatagtcattctgcctgccctgaa |
| NO: 84 | agtcccagatcaagcctgcctcaatcagtattcatatttatagccaggtaccttctcacctgtgagaccaaatt |
| 208296_x_at | ttgagttctccttttaagtaccaatgatacttaaatttctcagaaatgtaatggtgtgtcattgccttgaaatgcttgctta |
| SEQ ID | gggcttcttttatgttatcttaaaaagtgctggtgaattttccattttttacatccatttcacatgtaagagacacaaaagt |
| NO: 85 | ctagattggtcttgatattgagataataaaaagtaagtagcattaagaaaggtaacaatcttcattctacagatgaactcat |
| | tgaaacaatttaggggaatgaggggcaaaaggggagaaatactgctaaagaacatgagcataaaaatgcgtgcgtttcagtg |
| | tttaagaaggcttgataaagaatgtcacttttttatttaactgataagatttttgttattttttactttgataagtaaacca |
| | aagaatatttgtatttcaagcagtttgtgtggtgtttctatataattttctgtgtataaataataaagtaggcatttgttta |
| | ttttgtaaaaaagaaatgaaaatctgctggccagctatgtcctctaggaaatgacagacccaaccacca |
| 208498_s_at | taaccatgacaatcaacgaggacatggcgctggaggagcctctatacttaccttctgggatgctaggctgtacaaaatggca |
| SEQ ID | gttggatttatgcttgctcatccttatggatttacacgagtaatgtcaagctaccgttggccaagatattttgaaaatggaa |
| NO: 86 | angatgttaatgattgggttgggccaccaaatgataatggagtaactaaagaagttactattaatccagacactacttgtgg |
| | caatgactgggtctgtgaacatcgatggcgccaaataaggaacatggttaatttccgcaatgtagtggatggccagcctttt |
| | acaaactggtatgataatgggagcaaccaagtggcttttgggagaggaaacagaggattcattgttttcaacaatgatgact |
| | ggacattttctttaactttgcaaactggtcttcctgctggcacatactgtgatgtcatttctggagataaaattaatggcaa |
| | ctgcacaggcattaaaatctacgtttctgatgatggcaaagctcatttttctattagtaactctgctgaagatccatttatt |
| | gcaattcatgctgaatctaa |
| 208688_x_at | tgagctacaggactcccgagtgtgagccgcggttcctctgttgcagcgcagccgtgtgtgctgtggagccgaggccgtcctg |
| SEQ ID | caggaagccgcgtgactcccgcctcctccctgtgctctctggctctggactgtgactgcgcctggattctgccattgcgaca |
| NO: 87 | catttttgtgcctttcagcccctggtgtctgcagtgggggatttaaggcacccgcttccacttctttcttgtttggagtttt |
| | ctgttggaaccgccggcgttggctccgaagacttagcgacgccactggcggcaccttctcctgcgcccagtgatgtttccac |
| | ggtgcctgtacacagccgagcagcatttccgttgaaggacttgcatccccattgcgggcagtgctggacgtgtcccggagac |
| | ccaccgggaggcgccgcatgccttgtacccccaccgtgcaggttgtggccggtttt |
| 208799_at | ctggcctctactacgtggacagtgaagggaaccggatttcaggggccaccttctctgtaggttctggctctgtgtatgcata |
| SEQ ID | tggggtcatggatcggggctattcctatgacctggaagtggagcaggcctatgatctggcccgtcgagccatctaccaagcc |
| NO: 88 | acctacagagatgcctactcaggaggtgcagtcaacctctaccacgtgcgggaggatggctggatccgagtctccagtgaca |
| | atgtggctgatctacatgagaagtatagtggctctaccccctgaaagagggtggatgcagctgcttgtgtttcttggggtga |
| | ctgtcattggtaatacggacacagtgacccatcctccatcctatttatagtggaagggccttcaattgtatcagtacttttt |
| | tttaagctctggcacattgacctctat |
| 208894_at | cgatcaccaatgtacctccagaggtaactgtgctcacgaacagccctgtggaactgagagagcccaacgtcctcatctgttt |
| SEQ ID | catagacaagttcacccca |
| NO: 89 | |
| 209078_s_at | agcgacttcttctgaggaggttcctggcctctgtcatctccaggaagccctctcagggtcagtggccacccctcacttccaa |
| SEQ ID | agccctgcagaccccacaatgcagtcctggtggcctgactgtaacacccaacccagcccggacaatatacaccacgaggatc |
| NO: 90 | tccttgacaacctttaatatccaggatggacctgactttcaagaccgagtggtcaacagtgagacaccagtggttgtggatt |
| | tccacgcacagtggtgtggaccctgcaagatcctggggccgaggttagagaagatggtggccaagcagcacgggaaggtggt |
| | gatggccaaggtggatattgatgaccacacagacctcgccattgagtatgaggtgtcagcggtgcccactgtgctggccatg |
| | aagaa |
| 209129_at | ggccaccctggagaaatgtgccacgtgctcccagcccatcctggaccggatcctgcgggctatggggaaggcctaccaccct |
| SEQ ID | ggctgcttcacctgcgtggtgtgtcaccgcggcctcgacggcatccccttcacagtggatgctacgagccagatccactgta |
| NO: 91 | ttgaggactttcacaggaagtttgccccaagatgctcagtgtgcggtggggccataatgcctgagccaggtcaggaggagac |
| | tgtgagaattgttgctctggatcgaagttttcacattggctg |
| 209150_s_at | cagttgtctggggaggattaccgctggtggtggcgatctgtgctgagtgttggctccaccggcctcttcatcttcctctact |
| SEQ ID | cagttttctattatgcccggcgctccaacatgtctggggcagtacagacagtagagttcttcggctactccttactcactgg |
| NO: 92 | ttatgtcttcttcctcatgctgggcaccatctcctttttttcttccctaaagttcatccggtatatctatgttaacctcaag |
| | atggactgagttctgtatggcagaactattgctgttctctccctttcttcatgccctgttggactctcctaccagcttctct |
| | tctgaatgactgaattgtgtgatggcattgttgccttccctttgccctttgggcattccttccccagagagggcctggaaat |
| | tataaatctctatcacataaggattatatatttgaactttttaagttgcctttagttttggtcctgat |
| 209254_at | gggtcattgtttaagatctggctggtggtacctagcctgctggaactggcatgggagaagctgcttgcggccttccctaacc |
| SEQ ID | ttgcaaacctctcccgaacacaacttctgcaccttggactcacacagggactcatcgaacgcttgaaatgaggatttntgga |
| NO: 93 | ctgttcattgatactggaaatgttaatttaaagagactcctttatttatgggcagtgtagaatgtgctacaaagaggattgg |
| | ttaccctgatcaaggccttatttagaaaatacatcagatgcctttctgtaaattggtttttcagtttatggacatctcactt |
| | tcccacgtgcttccttctttgcttctgttcctcctgacccattacatgcacatgtactcacatactccctcttccttctcga |
| | tggagttaa |
| 209262_s_at | tcgggccagtgaccatgacggggccacgtgtgctgtggccaggcctgcagacagacctcaagggacagggaatgctgaggcc |
| SEQ ID | tcgaggggcctcccggggcccaggactctggcttctctcctcagacttctattttttaaagactgtgaaatgtttgtctttt |
| NO: 94 | ctgttttttaaatgatcatgaaaccaaaaagagactgatcatccaggcctcagcctcatcctccccaggacccctgtccagg |
| | atggagggtccaatcctaggacagccttgttcctcagcacccctagcatgaacttgtgggatggtggggttggcttccctgg |
| | catgatggacaaaggcctggcgtcggccagaggggctgctccagtgggcaggggtagctagcgtgtgccaggcagatcctct |
| | ggacacgtaacctatgtcagacactac |
| 209277_at | gtgagactgaattcttgcaatgcataagatataaaagcaaatatgactcactcatttcttggggtcgtattcctgatttcag |
| SEQ ID | aagaggatcataactgaaacaacataagacaatataatcatgtgcttttaacatatttgagaataaaaaggactagcaaata |
| NO: 95 | aaactcattttgcatttaaaagttggnattatattttagtcccaagaagacaaagtcgcagattaacaacactttaaaaata |
| | tnactcccattttattgtgttagattgcagtacaatgaatgaataaggggatttatttaaaagatcttaactttcttgactg |
| | atttaaaaagctaatcaatttattaaagccagaaatgttctcctctgggaaagcaatttctatct |
| 209606_at | gaattgcaaaactgacatcccatttcacagcaatagtgacctttatttaaattgttgtgttatagtttatgcttcttaaatc |
| SEQ ID | atttttcaacctaaacagccaatttctaagcagacaggaaaactaaataataagttaattaatataacaaagatgcaggttc |
| NO: 96 | ctgctcattccagtaatgtctttgaaagcaaaactaatatttattttctagattatccctgtgaataattgagaactttttg |
| | gagtcaagtatgaataaaggtgtggcagaatataataatctggactattttctataggataattgctgggttataaaatctt |
| | aggtttgcttatgcccagtagctcctgcggaggcttaataataggcaattttgaatttgttcaaacctgtaatggcttgtaa |
| | acaaagatgaccatcagctgtttctcacatctatagtgacaataaagcgggaagtataagatttaataggaggggttaaggt |
| | tcatgagaaccatggaaagatgtggtctgagatgggtgctgcaaagat |
| 209728_at | gcatccaagcatgatgagccctctcacggtgcaatggagtgcacggtctgaatctgcacagagcaagatgctgagtggagtc |
| SEQ ID | gggggctttgtgctgggcctgctcttccttgggacagggctgttcatctacttcaggaatcagaaaggacactctggacttc |
| NO: 97 | agccaacaggactcttgagctgaagtgcagatgaccacattcaaggaagaaccttctgccccagctttgcaagatgaaaagc |
| | tttcccacttggctcttattcttccacaagagctttgtcaggaccaggttgttactggttcagcaactctgcagaaaatgtc |
| | ctcccttgtggcttccttagctcctgttcttggcctgaagcctcacagctttgatggcagtgcctcatcttcaacttttgtg |
| | cttccctttacctaaactgtcctgcctcccgtgcatctgtactccccttgtgccacacattgcattattaaatg |
| 209795_at | tagtctaattgaatcccttaaactcagggagcatttataaatggcaaatgcttatgaaactaagatttgtaatatttctctc |
| SEQ ID | tttttagagaaatttgccaatttactttgttatttttccccaaaaagaatgggatgatcgtgtatttatttttttacttcct |
| NO: 98 | cagctgtagacaggtccttttcgatggtacatatttctttgcctttataatcttttatacagtgtcttacagagaaaagaca |
| | taagcaaagactatgaggaatatttgcaagacatagaatagtgttggaaaatgtgcaatatgtgatgtggcaaatctctatt |
| | aggaaatattctgtaatcttcagacctagaataatactagtcttataataggtttgtgactttcctaaatcaattctattac |
| | gtgcaatacttcaatacttcat |
| 210017_at | aatgactgcaaaagtgccacggatatcaatttgagggttataaattttagcaagttggtaaattcacaaatacataaccttg |
| SEQ ID | aataatgaggatcaactgtaccatatttaataaagcacaaaacccananananngtcttattacagcatttgataaaatcca |
| NO: 99 | aaactctttcataaaaacactcaacaaacttaggaataaaaggaatcttcctagatatgataaatataacatctatgaaang |
| | cccacacctaacattatacttcatggtgatagactgaaggctgaatgttttccccttaagattgggaagaaggacaaggatg |
| | ttcactcggcactacttctattcagcattgtacttgaagttctagccacagcagttaggttaggaattcaaggtttgttcaa |
| | cat |
| 210052_s_at | agtcaagtgaccagcctctgactgtgcctgtatctcccaaattctccactcgattccactgctaaactcagctgtgagctgc |
| SEQ ID | ggataccgcccggcaatgggacctgctcttaacctcaaacctaggaccgtcttgctttgtcattgggcatggagagaaccca |
| NO: 100 | tttctccagacttttacctacccgtgcctgagaaagcatacttgacaactgtggactccagttttgttgagaattgttttct |
| | tacattactaaggctaataatgagatgtaactcatgaatgtctcgattagactccatgtagttacttcctttaaaccatcag |
| | ccggccttttatatgggtcttcactctgactagaatttagtctctgtgtcagcacagtgtaatctctattgctattgcccc |
| 210258_at | acagcaagcctatgtagttcaattaatatataaggaaaaggaaggtctttcttcatgatacaagcattataaagtttttact |
| SEQ ID | gtagtagtcaattaatggatatttccttgttaataaaattttgtgtcataatttacaaattagttctttaaaaattgttgtt |
| NO: 101 | atatgaattgtgtttctagcatgaatgttctatagagtactctaaataacttgaatttatagacaaatgctactcacagtac |
| | aatcaattgtattataccatgagaaaatcaaaaaggtgttcttcagagacattttatctataaaattttcctactattatgt |
| | tcattaacaaacttctttatcacatgtatcttctacgtgtaaaacatttctgatgattttttaacaaaaaatatatgaattt |
| | cttcatttgctcttgcatctacattgctataanggatataaaatgtggtttctatattttgagatgttttttccttacaatg |
| | tgaactcatcgtgatcttgg |
| 210260_s_at | gattgagtcatcgacattcaggatttaagtctgaggtagtcaaccctcaggaaaaaaaaaatggcttatctgaaatcagtac |
| SEQ ID | tgtggaaatgaactatattagctattatgaataatgtccagtataagaatatgcttctggaattgagttctccttttaagta |
| NO: 102 | ccaatgatacttaaatttctcagaaatgtaatggtgtgtcattgccttgaaatgcttgcttagggcttcttttatgttatct |
| | taaaaagtgctggtgaattttccattttttacatccatttcacatgtaagagacaaaaaagtctagattggtcttgatattg |
| | agataataaaaagtaagtagcattaagaaaggtaacaatcttcattctacagatgaactcattgaaacaatttaggggaatg |
| | aggggcaaaaggggagaaatactgctaaagaacatgagcataaaaacgcgtgcgtttcagtgtttaagaagg |
| 210306_at | aatgggtttaatgaggtctaccttgcagagccattgtgagcattggaaatgatgaatgaatcataccagaacgtctagtata |
| SEQ ID | attacagtcatgcattgcttaacgatggggatacattcttagaaatgtgtcactaggcaattctgtcattgtgtaaacatta |
| NO: 103 | taggatgtacttacacaaacctagatgttatatgtatttttatttacatgtatattttcacatgaaataccaaatgtcacag |
| | cattattactgaatgtcagtcatttcccctacttgatctgcaatgccaatatcaagggccatgtatcaggtttctgtatatg |
| | ttccactataatcttatgggaccatggttttaaatgtggaatcattgacagaaatgtntttatgtagcatatggctgtgtat |
| | cactagtatataatagagcaatattatggaggaatatgtagatccaatcactttacctatacaaaatgactgctatggtggg |
| | aacaca |
| 210976_s_at | gcgtaagagggctctggtcttccaaccagtggctgagctgaaggaccagacagattttgagcatcgaatccccaaggaacag |
| SEQ ID | tggtggctgaaactgaggcccatcctcaaaatcctagccaagtacgagattgacttggacacttcagaccatgcccacctgg |
| NO: 104 | agcacatcacccggaagcggtccggggaagctgccgtctaaacctctctggagtgaggggaatagattacctgatcatggtc |
| | agctcacaccctaataagtccacatcttctcagtgttttagctgtttttttcattaggtttccttttattctgtaccttgca |
| | gccatgaccagttctggccaggagctggaggagcaggcagtgggtgggagctccttttaggtagaatttaacatgacttctg |
| | ccccagctttatctgtcacacaaggctgggcacctctagtgctactgctagatatcacttactcagttagaattttcctaaa |
| | aataagctttatttatttctttgtgataacaaagagtcttggttcctctactactt |
| 211149_at | cagaaacctcgatatataattgtatagattttaaaagttttattttttacatctatggtagtttttgaggtgcctattataa |
| SEQ ID | agtattacggaagtttgctgtttttaaagtaaatgtcttttagtgtgatttattaagttgtagtcaccatagtgatagccca |
| NO: 105 | taaataattgctggaaaattgtattttataacagtagaaaacatatagtcagtgaagtaaatattttaaaggaaacattata |
| | tagatttgataaatgttgtttataattaagagtttcttatggaaaagagattcagaatgataacctcttttagagaacaaat |
| | aagtgacttatttttttaaagctagatgactttgaaatgctatactgtcctgcttgtacaacatggtttggggtgaaggg |
| 211421_s_at | aaggcttggatgcgtgtgtaatagagccttatggtgtgtgcgcacacaccacgagggagagtttgaaaaatgcttattggac |
| SEQ ID | acgtaacctggctctaatttgggctgtttttcagatacactgtgataagttcttttacaaatatctatagacatggtaaact |
| NO: 106 | tttggttttcagatatgcttaatgatagtcttactaaatgcagaaataagaataaactttctcaaattattaaaaatgccta |
| | cacagtaagtgtgaattgctgcaacaggtttgttctcaggagggtaagaactccaggtctaaacagctgacccgagtatggg |
| | gaatttatccgttaccaatttatccttgaccaataacctaattgtctattccgtagttataaaagtccccatccttattagc |
| | tctactggaattttcatacacggtaaatgcagaagttactaagtattaagtattactgagtattaagtagtaatctgtcagt |
| | tattaaaatttgtaaaatctatttatgaaaggtcattaaaccagatcatgttcctttttttgt |
| 211603_s_at | ggtgctgccctgtgtacatataaatgaatctggtgttggggaaaccttcatctgaaacccacagatgtctctggggcagatc |
| SEQ ID | cccactgtcctaccagttgccctagcccagactctgagctgctcaccggagtcattgggaaggaaaagtggagaaatggcaa |
| NO: 107 | gtctagagtctcagaaactcccctgggggtttcacctgggccctggaggaattcagctcagcttcttcctaggtccaagccc |
| | cccacaccttttccccaaccacagagaacaagagtttgttctgttctgggggacagagaaggcgcttcccaacttcatactg |
| | gcaggagggtgaggaggttcactgagctccccagatctcccactgcggggagacagaagcctg |
| 211676_s_at | gaaaatattcctgacgtggtcccgggcagccatctgactccaatagagagagagagttcttcacctttaagtagtaaccagt |
| SEQ ID | ctgaacctggcagcatcgctttaaactcgtatcactccagaaattgttctgagagtgatcactccagaaatggttttgatac |
| NO: 108 | tgattccagctgtctggaatcacatagctccttatctgactcagaatttcccccaaataataaaggtgaaataaaaacagaa |
| | ggacaagagctcataaccgtaataaaagcccccacctcctttggttatgataaaccacatgtgctagtggatctacttgtg |
| 212134_at | tcagccctgatgcacaggctgccagccccccagtccagccctctcccttccactggtgccttgcttagagccagaagggatg |
| SEQ ID | aagccgggggatctatggaacagaggaggagcgatgcagttgggagaggaagctagaagggttatggttggagttctgtana |
| NO: 109 | gtgttgagtttccgacagggaaagaggattcctccaatgcncctagagagaaagcctgagcaggagatgatgcagcagaggg |
| | gaagggccctgtggtgccgccgcccttccttcagcctccgaagggtgatggaaatggagagtggaggaccaggcctccagct |
| | gtctggcctcgcccttcacgccttaacactaagcccacctcccctgctctccttcccagcattgagcccttggttgcctggg |
| | cccaggctgggggttttcagtatttgtaagcatttcagcagaac |
| 212349_at | tggagtgtgttcctgaagagcagccaggaggccagcatggctggagaggcaggcataggcagggaaccgagcagcaggtcag |
| SEQ ID | agcaggcgagctgacattctgcagcctggacggccatggcaggaagcttttagttggagagatacaggaagcctcctagggt |
| NO: 110 | tctgagcagaagaggggcatgagctgattcacattctgaaggacctctctagctggccagtgctgaggaggttggagagaga |
| | aagggtgaaagcagagagaccagtgcagggctgttaacagggttgcaggcgagagactggggtgctgggctcccctagacta |
| | ggactccagtgccctcctctcccaagagacaaaggccattgc |
| 212379_at | aaatcgtggcaaaatcttccctccagtactcctctccagcacctgatggttgtggtgaccagactttaggggacttacttct |
| SEQ ID | cacgcctaccagaatctacagccattcactgttacctgtcctacgttcaggacatgtcaaagcctttgcccatattactggt |
| NO: 111 | ggaggattactagagaacatccccagagtcctccctgagaaacttggggtagatttagatgcccagacctggaggatcccca |
| | gggtcttctcatggttgcagcaggaaggacacctctctgaggaagagatggccagaacatttaactgtggggttggcgctgt |
| | ccttgtggtatcaaaggagcagacagagcagattctgagggntatccagcagcacaaggaagaagcctgggtgattggcagt |
| | gtggttgcacgagctgaaggttccccacgtgtgaaagtcaagaatctgattgaaagcatgcaaataaatgggtcagtgttga |
| | agaatggctccctgacaaatcatttc |
| 212654_at | ggtggccgagagtaaatgtggggacctagaggaggagctgaaaattgttaccaacaacttgaaatccctggaggcccaggcg |
| SEQ ID | gacaagtattccaccaaagaagataaatatgaagaggagatcaaactgttggaggagaagctgaaggaggctgagacccgag |
| NO: 112 | cagagtttgccgagaggtctgtggcaaagttggagaaaaccatcgatgacctagaagatgaagtctatgcccagaagatgaa |
| | gtacaaggccattagcgaggaactggacaacgcactcaatgacatcacctccctctgagccccacgccagcgtggccacctc |
| | agctctcttctctcctctcctttccattctctctatggggaggggagcaggcaggaggagcagaaattgccaacattgcaca |
| | gccaggctgggagcagcctagggagagcccc |
| 212671_s_at | accaatgaggttcctgaggtcacagtgttttccaagtctcccgtgacactgggtcagcccaacaccctcatctgtcttgtgg |
| SEQ ID | acaacatctttcctcctgtggtcaacatcacntggctgagcaatgggcactcagtcacagaaggtgtttctgagaccagctt |
| NO: 113 | cctctccaagagtgatcattccttcttcaagatcagttacctcaccttcctcccttctgntgatgagatttatgactgcaag |
| | gtggagcactggggcctggatgagcctcttctgaaacactgggagcctg |
| 212684_at | gactatttcaaagctactgttcctagtccagctttaagtttcggtaagaaacatgctgttttgtttcatgatttcgttaatt |
| SEQ ID | atggaaatttggcattgagggattattttattgagggtagaagagattccagaatcatcatctgtgatgatggtgtccttta |
| NO: 114 | gggctcttggagcagccagaccatgtttccaagagaaacctggtgatattgccagcagaccccctgccatccccccnagttg |
| | tcctggggctgaatgggcaaatctgtccaaacagctagtaaccggctgtgagggagagggtcagaagcacttagcgttggcc |
| | tctgattgctgtcctctcttgtcctcttcccactccaatgatgaaaatgattttctctaaatgcctgggtaaggatgctttc |
| | aaggagctcacttggcctgctt |
| 212775_at | tcaccgtcacagagtcttaccaaagtcaggacagttcaaataacaatccggagttatgcgtcctcttgaaaaagccgaagac |
| SEQ ID | ccggcggctctggtcccgcttccccccatggcgacgaacagctggcactgagtagcagctgc |
| NO: 115 | |
| 212776_s_at | tctcctcgtggatcgtgtatcccagcggcaaggtgtatgtggcagcngtgcgcctggagcgtgtggtgctgacctgtgagct |
| SEQ ID | atgccggccctgggcagaggtgcgctggaccaaggatggagaggaggtggtggagagccccgcgctgctcctgcagaaggaa |
| NO: 116 | gacactgtccgccgcctggtgctgcccgctgtccagctcgaggactccggcgagtacttgtgtgaaattgacgatgagtcgg |
| | cctcctt |
| 212801_at | caaggcatctgttgctttgggtcctccacgactcttaggcccgcctcaacaacccaggcacctcctaggtaggctcaaaggt |
| SEQ ID | agacccgtttccaccgcagcaggtgaacatgaccgtgttttcaactgtgtccacagttcagatccctttccagattgcaacc |
| NO: 117 | tggcctgcatcccagctccttcctgctcgtgtcttaacctaagtgctttcttgtttgaaacgcctacaaacctccatgtggt |
| | agctcctttggcaaatgtcctgctgtggcgttttatgtgttgcttggagtctgtggggtcgtactccctcccctcccgtccc |
| | cagggcagatttgattgaatgtttgctgaagttttgtctcttggtccacagtatttggaaaggtcactgaaaatgggtcttt |
| | cagtcttggcatttcatttaggatctccatgagaaatgggcttcttgagccctgaaaatgtatattgtgtgtctcatctgtg |
| | aa |
| 212877_at | gaggaaaatgaagctcgggctggttaactgacttgctcagcgtcccatggcctagccgcccgtgactctcacactgtctcct |
| SEQ ID | gcatgacgggtggcgcctcccgcagcttcccttctctctccagtgctgcccgctgtgtctagcagcctctaggatcttgtca |
| NO: 118 | gagctgcacctctctgtgaactggccattcctttcggtgctgctgtcctttttgggggggttcctgatttctgtatacatgt |
| | agctttgccagatatgtacttagtaatataaactgtattaataaaatccatttactgtgt |
| 213077_at | acaggtttgatggcacttctcatgatacattttagttattcttataaaagcaaacaggcaaacatgagtgtaaattaaagac |
| SEQ ID | aaaaagaaaactctggttttatatttgagancacgtgaaaaatcatgggtcaacataaaatcttgagaaccttctactttct |
| NO: 119 | cngggaaagcattatatagtggtgcattagtttagaaagtcagctatgattttgcctatagttctagttattagctttgggg |
| | ttttcttgtactttaagacatacctgtaaattgaacctatttgaattatattccactgtatgtgtattatggctcttttcct |
| | attagagcaacttgtgtttccctgataatgtgtacattttttaggcatgtacttaatagttcacaatgttctaaatttggaa |
| | ggacttaaaaaaaaaacttgtttaaatttccatctgttttgtaatatctagctctata |
| 213196_at | ctccccaagctcctttaaccaggagcttccctcccagagtgagctacgtcttgggaggattgaagcagggaggtggcagtgg |
| SEQ ID | ctagagttgctcagatcggctcagatgaaggcccaggggtcaaagcatttgctcaccacaactgagtctggaaggcactgtg |
| NO: 120 | cagccaaaccctcttgtccaatcacatgcaggccccaggcccctcagaaacgccctggtggagggaggagcccaacagatag |
| | ggtcagggagtcagtggggaaagcagaggggagagcttagagtgaaacttgaaactgctatggacatggaggtcagatggga |
| | acttggaactgggcatgaatcctgaatggtggggaaacttgaagccatcacagccaagaggtggggttccatgacctgccct |
| | gaggtcagcagctcccagactcctttgccctcactagggaagccccagtcaccggacttgtccccatggagtgaagagaggc |
| | cccatttttgagtgttgtgtgtccaaaacagtgttgtgtcactggtggtcatgttgc |
| 213295_at | tggagggattgtcctttcaagcaccacagcttcagataaaattagtactttcaaatattgtccactttaacttaaaaaattc |
| SEQ ID | tagagggattatattggagactcaactgcccttggttttagtttataaaatggcctagtactgtggaattttaattttagaa |
| NO: 121 | agtcttagcatcagatcataaacattcattaaaagaactcacatcccatctgaaacttcccaggggagttgggattcttagt |
| | agattggtagaaaggggctcattttctactgcatttcccatttttggtatcttgttcagcatgttttatttttatttcttgt |
| | ctgcagaacatcctatatttatgagaacattctttaagaagaccaccacatagaataccccttcctatcagctcgctctgat |
| | ttagccttaat |
| 213547_at | tggttccttcagagggtgtctctgcctcacannctagtagtatttagaaataggctgtgctgtcagctgtaaaagatcagga |
| SEQ ID | ggcagcagacaccactctggtttcttcactgcattcagcaatgcctgaagttagtgctcagnccgggcatctcaaaagaaaa |
| NO: 122 | gatacttgagttattcacattttaaaattcaaaacggttcatttttaagtggcagtgatgaatcagaaatttggaagatgat |
| | acgggtttcttttttccagggaggaggaatgggttgggtagggaactggacaggcttggacctcatgtttcatttctaattt |
| | caaaatacttattagcaaattgggcaacaatgggcatcttccatgccaccacccaggcataaccagttggtttgtttccttc |
| | tgaggaaggtttcaaatgtgtctagtgttcagtattgaggacaaagaaatacaagtggcaggcccaagtattttctgtgata |
| | tcccaggtta |
| 213551_x_at | gaggtctcagctcttggaggagggctaaggctttagcattgtgaagcgctgcacccccaccaaccttaccctcaccggggaa |
| SEQ ID | ccctcactagcaggactggtggtggagtctcacctggggcctagagtggaagtgggggtgggttaacctcacacaagcacag |
| NO: 123 | atcccagactttgccagaggnaaacannccttccaattgcccctccacccccagctgaggcccggtcacctggtcaggacag |
| | agcaactgcatctaaaagcacaagaagacagaaacctgtaagctctgaccccacccccaccccttgagaggtcagcggacca |
| | cctccttagggacagaccctggcaggtcgctgcccaccgagatttcctcaagtgtgcatagatctgagaggagtcgggagtc |
| | gagactcgagattccatcatagcgtaggtgtgtggggttgggagccccctgatgggcttgtctgtgtttgcaccttgtcctg |
| | tgtctgaggtcctgtgactgtaccctcctttgccctgggacatctgtatc |
| 213569_at | ctaggcttgctttatcatcacatcccaaggccagagggctgctgctgtccccatcttgngccctgctagaagagggatagng |
| SEQ ID | ggtggctggcatgatgnggtgaggggnnnannagaatatgcagaggccttggaggaagaggactggcagttatgacaggaag |
| NO: 124 | gctctctatacctggctccccagtgttctgcccctggcactgagcatgaggagccaggctttggggagactttgcaatcacc |
| | cccccaacctggtccattttccacaggtagctttcttgaactcaccttgacccctcctcagccagcagcccccacctccagg |
| | ggcaaaggagctgaaagacagtcctgaactggggggagctgggatcacatcagccaggccctgtccctcacaggaagtgaga |
| | tgaggtgataccatggatggtgactaaggccccaaagtccct |
| 213587_s_at | aggggaagaaacgacagcctcacttctgtatggactgctgatgtggcctgccatcctgttcagcgggcattgtctttggagc |
| SEQ ID | agcaggagantaggatgcctctcactcacatgccagttcctggctggccagctgctcagggctcaggctggggcctcccatt |
| NO: 125 | gacatcctccccctacactccctctntgagcctccgtcgcccctcctgttgggtaagggtgttgagtgtgacttgtgctgaa |
| | aacctggttcatatata |
| 213618_at | caatctatattcacaggcccatacttcagtcagtccaatcatagtacagtgatcgaccaanngnnnnnnnnnnnnncnnnnt |
| SEQ ID | tgtaaaatacggatcatttgtattttggggtgataaaatagttcaccatgggtatgagatatttattctttaaatcaaagta |
| NO: 126 | aattagaatttttaaaaagcacaaaactgcaggacagtttatgaaataggtggcactattagggaatcttcctttaaagcaa |
| | gaaatcatgttatttagaaagaaaaactaatcttaaacatactatttctaataaatatttatatttttatgaaataaagagg |
| | tatgtggaaattaatatttggtgatgttggacagtggaaaagtatctagagtttttacctgccttatctgaattcttcttga |
| | aacttgagcttaaactctaatagctgtttccctttctattctgaacaactgtctccatttttcaa |
| 214131_at | tttgatggggacagcccacgtctgatagggtgggacatggggcagcagttagagggttgtgctctttctagtgtgggatagt |
| SEQ ID | ttgcaagatgatatgttgtagccacttctgcagtgacggggacagaaggagtcagtgttcttaactacagtggtagcagcag |
| NO: 127 | aaaagaagggtaagcagggttctagaaatttgtgttatgttttctccccactgtatttatttctttggttagtggtgcaaga |
| | aattctgttttcctgtagcaaattaataaagcgttcaaacataaggaattacgacaacagcttgtagatgccagacttcaac |
| | aaacagcacagctgataaaagaagctgatgaaagacatcagagagagagagagtttgtaagttctacttct |
| 214218_s_at | gtgccagacttctgagaagcacctgccagcaacagcttccttctttgagcttagtccatccctcatgaaaaatgactgacca |
| SEQ ID | ctgctgggcagcaggagggatgatgaccaactaattcccaaaccccagtctcattggtaccagccttggggaaccacctaca |
| NO: 128 | cttgagccacaattggttttgaagtgcatttacaagtttctggcatcactaccactactgattaaacaagaataagagaaca |
| | ttttatcatcatctgctttattcacataaatgaagttgtgatgaataaatctgcttttatgcagacacaaggaattaagtgg |
| | cttcgtcattgtccttctacctcaaagataatttattccaaaagctaagataaatggaagactcttgaacttgtgaactgat |
| | gtgaaatgcagaatctcttttgagtctttgctgtttggaagattgaaaaatattgttcagcatgggtgaccaccagaaagta |
| | atcttaagccatctagatgtcacaattgaaac |
| 214901_at | cgaagccggcggcgtgaacaatcctcgagcaggaactcacacctggttcagcatcaacacccgaactccagaaagagctctg |
| SEQ ID | caggcggagcaaaggcagggcagccggaaagcagagccctggctttgtttgacatccaaaaaatcatgcaagagaaaaaccc |
| NO: 129 | tgtgcacgttattggggtggaagagccttctgtgggtgcttccatgttatttgacatcagagaatccacataggagagaaac |
| | tttgctgatgacttttaaccacaagtaaaaaatgtggtaagtccacatagtgtactcatggaaggaggggctgggggtagaa |
| | atgtcatgggtgacttctgactttctaaggaaatgatgcttcccaagcacccgaggttggttggtcccaaatctatcaaact |
| | cagtgccctctttagcgacatattttgtgacattccttccattacaccacagtgagttcacaggtaatataacctacccacc |
| | tgtgtaatgtcaaaaaaaatcaatatgcggccccattttgta |
| 214983_at | gttccttttcgattcttggtcttatttcttcacccatctactatagtgcattcttgccatgcagccctttttatggagcaag |
| SEQ ID | tcacaatacagcagcttgcttcattagggcaagcaagcaagacaagctgcagcaaatgcaagtaacatggaagtctttataa |
| NO: 130 | tctaatcatggaattgacatagttaaaaacaaatcattaggtaggctccaaattgatcagaacatggttattggacaaaacc |
| | atgactgtcaggaggctgcatcatggggagccattttacaagcagcaccatgggtgttatgggggattttattacatttgtt |
| | ctgctcttaagagttgaaagtctttaaaaatgtgtaagtctgtcgtttgttcttgacttctgtcatgttttcaagaatgcat |
| | tatgcaatgatgtagaatactgtttgtaaagtagttgtctagactctagtgaaaataattacagataatctcagttcatcaa |
| | cgaatcggt |
| 215314_at | ctcagcctcctaaggagctatttttngnattttagtagagncagggtttcnccgtgtnggncaggctggtctcgaactcctg |
| SEQ ID | ncctcaagtgatccacccgccttggcctcccaaagtgctgggattacaggtgtgagccaccgtgcccagctagattctttac |
| NO: 131 | tttttaataaagttcaaaatagcttttaataaggttgtcaaatttgaccaaaatttcatagaagtccaaaatattatgcctc |
| | tttctgtagatcaaatgaaatatggcccaatttacaagggtatacaccttcatggtagatgaatatagattttaaactagtt |
| | ttaaaaggaatatgaatgatttaattgtagtttctgctgccaaaaagtctccataattattttttaataacttataactacc |
| | ttgatctttacctgtacacacacacacacacacannnnnntgcacagagtaatttcacttagaatcctggtca |
| 215359_x_at | ggactcacactggagaaagaccctatgaatgtaaacactgtggtaaagccttnagtcgttccagtttctgtcgagaacantg |
| SEQ ID | aaagaactcacantgnagagaagccctatgaatgtaaggaatgtgggaaagccttcagttctctcagttcctttaatagaca |
| NO: 132 | taaaaggacacactggaaggatattctataagtgtatggaatgtgggaaagcattcattggttttatcacattcagatactt |
| | gaaagaaataaatcctgtgaatgtaaacgtggtaaagccttaagaagtttccaggctgggcgcagcggctcacacctgtaat |
| | cccagcactttgagaggccgaggagggcagatcacgaggccaggagatcgagaccagcctggctaacatgggaaaccctgtc |
| | tctactaaaaatacggaaaaaaaaaaaaantagccaggcatagttgctcacacctgtagt |
| 215666_at | gaaaaatccgtggaactgaagctgagatctttagtacgtggagtcaccttacagatacagagcatttatgcggtattcattg |
| SEQ ID | gtgcctaaagaactttaggcatcctctggaaaaccggcc |
| NO: 133 | |
| 216438_s_at | acagagacgcaagagaaaaatccactgccttccaaagaaacgattgaacaggagaagcaagcaggcgaatcgtaatgaggcg |
| SEQ ID | tgtgccgtcaatatgcactgtacattccacaagcattgccttcttattttacttcttttagctgtttaactctgtaagatgc |
| NO: 134 | aaagaggttggatcaagtttaaatgactgtgctgcccctttcacatcaaagaactactgacaacgaaggccgcgactgcctc |
| | tcccatctgtctatctggctggcagggaaggaaagaacttgcatgttggtgaaggaagaagtggggtgggacaacagtgaaa |
| | tctaaagtaaaaccaagctggcccaaggtgtcctgcaggctgtaatgcagtttaatcagagtg |
| 216540_at | gagaagaagtccccaacatgactgtaacttgttgattctttatatttcaagaggaagtgtccaaaactgatctcattcctct |
| SEQ ID | cctttcatcctgggagcagtgggtgtccagagcaaacaaaaagaacttattttggctggacagcaagcagagtgccagttcc |
| NO: 135 | aaagatgagcttgtttgtagcaccaccataaatttgggaagcacagtaatacatggctgagtcttcctcttgagcaaatggt |
| | ttcttcaggtggaaagatgtctcgcctttgttaaggtcagcag |
| 216958_s_at | tgtaatcccagttacacagaagactgaggcaggagaatcgcttgaacgcaggaggcagaggttgcaggagctgagatcgcgc |
| SEQ ID | cattgcactccagcctgggcaacagagtgagactctgtctcaaaaaataataataaaataaatgaacacacatgctgctgag |
| NO: 136 | tccgcaggggggcagagcagaggacagcgtgcttttgtgtactgttggaagactggctcctcctgtacagcacctctgagcc |
| | cttgtgcaccgccctgccacgggcaccatccagtcctggccgtgtgaccacccacagctgactgggcagcaggcacaggccc |
| | tacccgagcaggccggagttggctcgcatgactccagctgaggctgcctgtgtacatttctccagataccctatggctaatt |
| | ttgttataactgcacag |
| 217147_s_at | tctcctttctcaccaatgggcaatagcccataattgaaataaatttctgattgaaaggtataggaaacattaaaatgcatta |
| SEQ ID | ctaagagaagtaatataattttcttacaaagtatttttcccaaagatagctttactatttcaaaaattgtcaaattaatgca |
| NO: 137 | tgctccttacaacaaacaaatatcaaaaagagtttaggaattctactagccagagatagtcacttggagaaactttctatat |
| | atccttctaaatatttttctgggcatgctcatgtatgtacatcagttgtttctttttattttgaaccaaaaatgtggtttct |
| | tttgtacacattacttaaactttctttccagtcaacaatatattgtggatttattttcactgttatatttaactatatataa |
| | atacgcatatattgtaattttaatgtctgcttagcaccccactgataaccaaatcacag |
| 217778_at | tagggactggcgccaaatggtctctccctgccaattttggtatcttctctggcctctccagtcctgcttactcctctatttt |
| SEQ ID | taaagtgccaaacaaatccccttcctctttctcaaagcacagtaatgtggcactgagccctacccagcacctcagtgaaggg |
| NO: 138 | ggcctgcttgcctttttttttgttncccggatcctggggtggggcagaaatattttctgggctggggtaggaggaaggttgt |
| | tagcatctactgctgccgtaccctaggaatatggggacatggacatggtgtcccatgcccagatgataaacactgagctgcc |
| | aaaacatttttt |
| 218553_s_at | agtcctgtctgtgtggactggcacctgggctgctggagaagtctcctcccgttcggaccagcctcagggctgcacgttacct |
| SEQ ID | caggaatgggccccaccatgaaggggcccatctgtcagcagcgtcttctaggtccccagctcagggagccatccccagctcc |
| NO: 139 | agttttctcatgcgaatatgcacagttttaattcacgttgttacactagcctgccgatgagacccagacacaggcagacctg |
| | gcgctcttgacccctgattccagtgaggactggccctgaggagtccttgcagacctgctgcctgccccacgacaggcccaaa |
| | gatggaccccccctggccttgtgacagctccccaagtgttctccggtggagaaactgcagaggactggtgggcggggctccc |
| | cagccatcaccatcctgtgtacaatggctgtagacttgtatatggctcctttaatattgtaaagatgctgatgtacaattgt |
| | cgtgcatttgtgtgaacacattgcgttcccagtc |
| 218723_s_at | actgaattctccaacagactctaccccagctcttctctctgccactgtcactcctcagaaagctaaattaggagacacaaaa |
| SEQ ID | gagctagaagccttcattgctgatcttgacaaaactttagcaagtatgtgaaacaagaagttctgggtcctttcatcataag |
| NO: 140 | ggagaagcttcagaaagttccgaggacctgctaaaatcagctactagaatctgctgccagaggggacaaagacgtgcactca |
| | accttctaccaggccactctcaggctcaccttaaaatcagcccttgatcccatttctgggcaatttagacagtgaaactgac |
| | tttgtttacctgcttgcagcatattagaacagacgatccatgctaatattgtattttctcttaaaacatagctttcctgtaa |
| | tttaaagtgcttttatgaaaatatttgtaattaattatatatagttggaaatagcagtaagctttcccattataat |
| 218786_at | tgctggctggccatttacttccagcccttatgaggagtttcccctgctgaagagccctgcctgccccagatcataccccctt |
| SEQ ID | cctgcctgtaacccttaccggctccatatggggtacaaaggtctggcctcctcaccccaacttgggaaaccctctggggcca |
| NO: 141 | tcccagctccagagccccttgtggggtcagtgagacctcattgtggccacattacagcccagtgcctctccctgacaagcct |
| | gtacccagccggctcagcccacagcactgtcctatgaaccttcctgcacgccattctccacctcagtatctgctttcgggga |
| | acccaacctgcgacagtgcttctgtgtgttttcagtcctgcaggtttgaactctgactttggagacttttccagttatctcg |
| | tggaat |
| 218838_s_at | gggcatggtaattagcctttccccatgttaatttattcagttttttcaagggtcaactgaattccccacttcctgggtaaga |
| SEQ ID | agcatgatctccttttaatttcacgtctaagatcctggcagcttcccctagctggttcctctgtagtcctgctgggactgtc |
| NO: 142 | agctcatttaaatgtgggtctgcagaaggctttaggtctcccccaacccccttacctttcacagaggaacctttcatcagga |
| | taaatgattattgctgccctgtgggtcttgctcaatactgttcatacctggagagagaaggtattgaaacatctcctttatg |
| | tgtgactttcccaaatttttaaaaattgtttatggtttaggccccttaaatactgtgtagcaggatgaagtctaccattacc |
| | agctgggtcaccttggatgggtctgtcaacatctaagcctcagttccctcacctgtaaaaatgagggtagtccctacctcat |
| | aaggg |
| 218956_s_at | ttccataggccgatgctctgaaagaagagacgtggggctcgagagatttaaagattttatttttacaaatcacagctgatag |
| SEQ ID | acagcgaagccttccccatagagaccgtgctccaactcgggcctggggcactgctcgctgctcccaggaagggggtggcgtg |
| NO: 143 | acaggcaggaacctgcgaagtccagagtccagggtggagcgcaccagcctcagccagagcagccacgacagccacagtgtgt |
| | gcactcgatgatgcggccctgcaacggaggaggacagtgagacgatgccactgcgccacgctcgcccctgcacactcacata |
| | tgtggcaaccctcccacgaaggacctgccaccatgccatatagggacacacctcagaaacccttccttgacagctctggaca |
| | gggaaaatttggctccctcatgaaggtagaaccagctgctgttgacaccgaggttacatctgtatgtctatttataatatgt |
| | tctgcaaatccaacacacgtt |
| 219343_at | gacagttcagaatcatgttccccattctggtgttggatctataggtttattagaatccttaccacagagtccagattatctt |
| SEQ ID | cagtattctatcagtacagctctctgcagcttaaactcggtggtacataaagaagatgatgaacccaaaatgatggacactg |
| NO: 144 | tataatttggttaagactgctgaggccaagtgctattttgttacaagaaaggaagaacttggctattttcttgacactttta |
| | tgggtgctgcactttatttttgtttggtttttgatgggagggaaagagtactgaaatgttttgtaaattttttttaatgtgc |
| | tgctaggttttttgttttgttttgttctgaagagaagagtggtaccatatgttgcaggaagtcaaactggactttttgtggc |
| | tactaaatttgcctttaatcttattgttctcaattttggaatcaagtatgaaaatctgcacaaatgcaatgtttacaagaac |
| | tggttgattctgggaggcatctgctacagtctctttttatatggatatgtacatgtcctattctac |
| 219368_at | agtgttgtgtagcttaatccttctgaagtctttttgtcatgtagctattaatctgtggctatgaaatgatcagaaatgctaa |
| SEQ ID | gtgagatcaatatttgtttggaaaaaaaatcttgggaaacaacccaagggttttcgctgttgttgtttttctttttctattt |
| NO: 145 | ttgtttacttagtcctttagctagtggatttaattttgttgtgcctgcttcattttgcaataacaatgcagtagaatttaaa |
| | acttggatgcttaagaggcctgcatatagataagaatttcaggcaaaactacatttattgttaataacagcttgttcatagg |
| | ctcttgtattttatgtaactgtgataaataatgaaacttagttatattgaggttattgtttgtcggtgaagtgttagtcaca |
| | gtattttcaaaagtttgcacatattgttctgtgtaattgtgtaagccataattacagtgtttaattctcttttcctattaca |
| | tcattcattgaaagtgatcactttaccattttgaaa |
| 219551_at | gaacaggtgaccataactctgccaaatatagaaagttgaaggaagtagtaaaattcagtatcgtaaagaacaacagcaacaa |
| SEQ ID | caaatgtggaattcagccaggactcccaatcttgtaaaacattctccatctgaagataagatgtccccagcatctccaatag |
| NO: 146 | atgatatcgaaagagaactgaaggcagaagctagtctaatggaccagatgagtagttgtgatagttcatcagattccaaaag |
| | ttcatcatcttcaagtagtgaggatagttctagtgactcagaagatgaagattgcaaatcctctacttctgatacagggaat |
| | tgtgtctcaggacatcctaccatgacacagtacaggattcctgatatagatgccagtcataatagatttcgagacaacagtg |
| | gccttctgatgaatacttt |
| 219844_at | atcaggcacactttcttcagaggcatctgattttaacaaagttcatttaagtagacggggtggcatcatggcatctttatat |
| SEQ ID | acatcccatccagctgacaatggattaacattggagctctctttggaaatcaaccgaaaattacaggctgttttggaggata |
| NO: 147 | cgttactaaaaaatattactttgaaggaaaatctacaaacacttggaacagaaatagaacgtcttattaaacaccagcatga |
| | actagaacagaggacaaagaaaacctaaaacaagcctcttgctcagtaaagagacaaaagccacacaggagtaggtgccact |
| | gacctctattgttggagactttgttccactttttgtttcagccagtaaaaatattgttttgcttcatctgtacacaaaaaaa |
| | tacccttttacaatatgaatgcattgctgtatatactgtaagactgaaagctttgatgaaatttgtttttgtatggtgcaat |
| | atgacagcctgtcattgaatctaaaca |
| 219901_at | agcagaggatgctcattcggctcagaagtggatagaagcatttcaggaaggcacaatattgtagcagtattggtttcatctc |
| SEQ ID | ttctgtgattccaaagaggtggaatttcatcagaatggagtaaatgcaattcaaaaattgtataaaaatgaacactgccaag |
| NO: 148 | ataaagccaaccagacccttcatcaaagaaattgttttgttaggtataagcaatttttaaaaggtgtttgttttttcattta |
| | tgttatttattaaaattttgatgtttacttaatggtcagaattatttctgagacacactgaattctaaagtaccatttcttt |
| | agagaccagaaaaactatcttaatactgtatactgtattaactattcgtgacatagttcacactgttttcttaccttacatt |
| | gtaacaatcttactggtggaaagtctttgtaaggaaaaaacacatagcaaggagcaaatttccacaaagtgcttggtttagg |
| | a |
| 220005_at | ttcttgcatccttctgtgattcaaaaaagtaaaatgtggctttctgaaatgatggataagagtctacatcttctagaaaaaa |
| SEQ ID | tacataaaggagtagttaagctctgtaaatgtgccacgagctccaacacgaccatcgtagggtgaagcccacgttttcttcc |
| NO: 149 | atggcctcaaaggccctagaacttgcctacctttctggccttacctcctagctacttatccatctcttgaactttatactct |
| | tgtataaatttctaactttcagaaaatgccatactctgttttggcaccacacatgtatatttccccctggtacacttggaag |
| | actcttatccatctgtgaaaccctatgttgtcatcacttggtccatgaaatattacctggccaatatcccaccatcacctca |
| | aacccaatcaccccctcctctgtatgctgtcacacctatattattaaacttatcacattgcattgtaattacttcctgacct |
| | ttgtatctactcttttagt |
| 220168_at | aatatctttcctactagacactctcatttttatgttattataaacaataaggttcctttggtagaagtgaaagcttatcgac |
| SEQ ID | agatggccctactaagttctgcttttgcatttggttggagcaagtggaacctactatgtaattctacaaaagtcgtatttaa |
| NO: 150 | ggtgagggaacaccttactgaagaatgtactgagaatcctaattgggcccttttaatgtttagtggtgacagagcacaaaga |
| | ctgaagatcaaggaagagagtgaggcattttctgaagcacttaaagaagaaactgagtttcattctactttatatcacatgg |
| | tgaaggattttgcttctgaggaagcaatggagaaagtcaggagttccaactgtcagtttgtcaactctgtgtgccacatgct |
| | gctctctaccagattgctcagctactcctaacctccacttacaaactgtattgtaagtatgaagaaccaagcatggtgaaag |
| | acaggtatttctgcaacacaatgta |
| 220241_at | cgccagtacatcttctagcattgtcgtggaagttctccgaatcctggttttgattggtcagattcttttttcactagcggcg |
| SEQ ID | gtttttcttttatgtcttgttataaagaagtatctcattggaccctattatcggaagctgcacatggaaagcaaggggaaca |
| NO: 151 | aagaaatcctgatcttgggaatatctgcctttatcttcttaatgttaacggtaattctcaaactatgtgttatttatgtaat |
| | ctgatacataatctctttcactgaaatcttgtgatccattctttacctttccattttaataatg |
| 220301_at | ataagtcatttctaatctttgtataaaacagaagtgagcaagatgaatcagaaaaaaggtgttttgtattttaaaggtaaca |
| SEQ ID | gataaccaggtgattgaatctaagacaggctgtaagcatcgctgagaaactaaaaggacttttgacttttatctggatagac |
| NO: 152 | atttctacagtaaaatcatggaaaggcatcagcattgcaaagtagcatctaggtagaaatcaggccaaaattaagctgtggt |
| | ttccctctgagtagtgggaatagagaaaattaggaaattgtggttatgtgaatatttctttaaaacttttatgtacattata |
| | gtttattgcttcatatttaagtttagtttttaaggtaaaatgttattttgaacaaaaagacacttataattttccataccta |
| | ttttcaactgaaggcaacttgtaagatttaactcagtcaataacatactggttttactcatc |
| 220933_s_at | gttgtttactgaatcctggtgtgaaagcatatcagatatgtatgaactgctactgctgtacttccgatttacggacatcatt |
| SEQ ID | ttattgctatttgtagacgtgataacatgaacatgagtacctatttatgtgggccttcagtggatgggcagtgccactcagg |
| NO: 153 | tctctggggtttccctctctaattttaagtaaattgacatataactactatgcttataaaaatgaagtaaggaaaacaagta |
| | gtcctgtttgccactaaaaacattttcaaaggaaaaataaaatgaaagtactttttactttttatgatactcagaaattagg |
| | atgaagaacttttaaaattgctgaaggtcaaagaggttatctctgccagtcacaagtgtggctggtgtcattctgggtctga |
| | ctggagccctcctggactgtttctttaatttcaaaagccctgcagacatagtacctggtcagaactatgcctcggt |
| 221205_at | aaagcttatccaccacgattaagccggcttcatccctgggatgcaaggctggttcagcatacacaaatgaataaacataatc |
| SEQ ID | catcacacaaacagaaccaatgacaaaagccacatgatatttacctgtatacctttttaagtacaaataaatctgggctgtc |
| NO: 154 | attatttatgctaacactggttttgtgtccctggaatctatctatctaagtttttttttctttttttctttttccattttcc |
| | agtacctattagacagaatggctttcaattttttctcttacttccaaacttagtca |
| 221728_x_at | attttctagttttcattctgtacatttttagttagacatcagatttgaaatattaatgtttacctttcaatgtgtggtatca |
| SEQ ID | gctggactcagtaacaccccntttcttcagctggggatggggaatggattattggaaaatggaaagaagaaagtaactaaaa |
| NO: 155 | gccttcctttcacagtttctggcatcactaccactactgattaaacaagaataagagaacattttatcatcatctgctttat |
| | tcacataaatgaagttgtgatgaataaatctgcttttatgcagacacaaggaattaagtggcttcgtcattgtccttctacc |
| | tcaaagataatttattccaaaagctaagataaatggaagactcttgaacttgtgaactgatgtgaaatgcagaatctctttt |
| | gagtctttgctgtttggaagattgaaaaatattgttcagcatgggtgaccaccaga |
| 221759_at | cagcctagccttcaagtggtgtgagcggcctgagtggatacacgtggatagccggccctttgcctccctgagccgtgactca |
| SEQ ID | ggggctgccctgggcctgggcattgccttgcactctccctgctatgcccaggtgcgtcgggcacagctgggaaatggccaga |
| NO: 156 | agatagcctgccttgtgctggccatggggctgctgggccccctggactggctgggccacccccctcagatcagcctcttcta |
| | cattttcaatttcctcaagtacaccctctggccatgcctagtcctggccctcgtgccctgggcagtgcacatgttcagtgcc |
| | caggaagcaccgcccatccactcttcctgacttcttgtgtgcctccctttcctttccctcccacaaagccaacactctgtga |
| | ccaccacactccaggaggcagccccatccccttccagcccctaagtaggccctcccctccctaaatctgcttccgcaccacc |
| | tggtcttagccccaaagatgggccttctctctc |
| 221789_x_at | ttctcactctacagggtcctggtgaagagccagtgaggcccctggtacccaagccccctcccctgacctgggtgtgnctcgc |
| SEQ ID | tgctggggctctgcaggggcagcacagctggggtgcaggccaggctgccactccgggaacgcctttgcgccgggactttttg |
| NO: 157 | tttctgaaggcagtcgatctgcagcggggccttatgctgccatgcactgccctggctcctgccggacccccagggtgggccg |
| | tggcaggtggctgagcaggagctcccaagtgccggccaccgctgtcagggattgcccacccctgggcatcatgtgtgtgggg |
| | ccggggagcacaggtgtgggagctggtgaccccagacccagaattctcagggctctacccccctttcctggtcctaggtggc |
| | cagtgggtatgaggagggctggaaggcagagctttgggccaaaagcaggcgttgggggntcccccctcaagtttggagccgt |
| | ttccgtggttgtagcagaggaccggaggttgggttcctgat |
| 221874_at | ctggcctacgtgttcaattttctatgaacaaaggctttagtccttgacccagggctaaagtggtctgtccaagctgttgttg |
| SEQ ID | gtagagggagtatgataaaatgtttaaatctcatttggttaccttgagtcctggaacacgcagtaactgtcatgctatagtc |
| NO: 158 | ntcatctgtatttggctgggaatacaaatgaagattgtggtgtattcaagcagtagggtttttgcttttgtttttgttttag |
| | tgccaacaaaacttttttttgtctgactacattaaagataagactgactatatttatacaacagaaactttgtaatagattt |
| | tttcagctttgtgaaatcgaattttttttcatcagggctggttggatttcctttttaccctgtaatccaagcgttaatagtt |
| | tgttagaagatgggttattgcatgtcactt |
| 221905_at | tctgggtttagggctagccctgcctccatctcccttgggtaaaatgaagggtgtggggtaaaagatgcataaggccnttttc |
| SEQ ID | tagctctgacagcctagaagtccnaatcaccctgtaataaatatgtgttgaatgaagaaatgggtgaatgagcttgtcaatg |
| NO: 159 | tgattttaaaaaattgactaccntggaggaatgattaggaatctaaatgaagccagccctcggtatctgcaggtttctcatc |
| | catggattcaaccaactgcaaatggaaaatacgattttttttaaaaaaaggatggttacatccgtattgaacatgtacagac |
| | ttttttcttgtcattattctctgaacaatacaagaactctttatgtagcatttacatttattaggtattntaagtaatctag |
| | agattatttaattaaaatatacaggaggatgtgtgtcagttatatgcaaattctgtaccattttgtatcagggaattgagca |
| | tcttcagatgttggtatct |
| 222462_s_at | tcagagtggtttcattgccttcctaccctctctaatggcccctccatttatttgactaaagcatcacacagtggcactagca |
| SEQ ID | ttataccaagagtatgagaaatacagtgctttatggctctaacattactgccttcagtatcaaggctgcctggagaaaggat |
| NO: 160 | ggcagcctcagggcttccttatgtcctccaccacaagagctccttgatgaaggtcatctttttcccctatcctgttcttccc |
| | ctccccgctcctaatggtacgtgggtacccaggctggttcttgggctaggtagtggggaccaagttcattacctccctatca |
| | gttctagcatagtaaactacggtaccagtgttagtgggaagagctgggttttcctagtatacccactgcatcctactcctac |
| | ctggtcaacccgctgcttccaggtatgggacctgctaagtgtggaattacctgataagggagagggaaatacaaggagggcc |
| | tctggtgttcctggcctcagccagctgcccacaagccataaaccaata |
| 222520_s_at | aacatgctcacatacacagatctttccctttccttactagacctctctttagtttaagataagtttagacaggagaaagtgt |
| SEQ ID | atgtaaactacctgaaaggatgacaatcaatacaatgacaaatatgccagtttatttaatttgtttaaaaaaaaaaaggcag |
| NO: 161 | aaaacccaccatgggaaaataagcattttttaaaatctgaagttgctcttttcctgtgtggtctttgggaggagtctagtac |
| | aaaaactgaaaacctttggtcctgggaatttattttcatggctgttgtcatggctgagtagttttttgatgaattcaatcaa |
| | tgcagagaacgcttttagataaatcagaactctccttaaaatgcatttcaatcagaagcaaagtacacccattatttatgca |
| | gacatgtaaaaaatctaaaaattcttgcaatgagtagtataagccacctatttttacttccttctctgaaatattccagtta |
| | actcagcttgggttctgtgctcctcctctcttcctatagaacactgtgcataccttgaataa |
| 222654_at | gagacacatgatgatttgcattgtaataatttctgtgtgtatgtgtgtgtgttgnnttgtttttataaagaaaagtgtgttt |
| SEQ ID | gtacccatgagttcagcatttctgccatcttgctattttcattttccctgtggaagatgcatggttgcatccttttccttct |
| NO: 162 | gaccaacacttagtctttaactttgtaaggttcggtttaaggtttcagggttagcactatagttttggttcattttctcatt |
| | aacgataaaatatgctgtaaggcactataagaatataaatgattctattacaattgaaagttacttgacattacatgaattg |
| | aactgcctttcattatcttcagacactttgttttagtatttttttttaatttgctaggtttgtatatagaagatcctttcat |
| | tatcaagaatgagtatggttgcttttgccatggttgcttttactattaataa |
| 222778_s_at | ttgtgaaccatttaacccttttgatccaaggccccggaccaaggggatactgtaatcaggttatgtacaccaacctctgcat |
| SEQ ID | cagttgcttctatagagcatcagccctcatgtttcattgtcttaatgtcggggagcagcctggtgtcctgccccaggtgtcc |
| NO: 163 | gcatttttgcatggtaaggaaaaggcttacttgcccttcagctcataaaagcagaaggtgtgctattcacagtaccatgcga |
| | gtagcccacagttaattcccggcagattctttggctgtgttttatctttaatgaacgtttctgactaatattttgttgtaaa |
| | ccattaagtaatgtaacgcatgtaagatgcttagggtgcctggccaggactccgtggtttcctgttgtgacagt |
| 222802_at | atgagtctacctcacctatattgcactctggcagaagtatttcccacatttaattattgcctccccaaactcttcccacccc |
| SEQ ID | tgctgcccctncctccatcccccatactaaatcctagcctcgtagaagtctggtctaatgtgtcagcagtagatataatatt |
| NO: 164 | ttcatggtaatctactagctctgatccataagaaaaaaaagatcattaaatcaggagattccctgtccttgatttttggaga |
| | cacaatggtatagggttgtttatgaaatatattgaaaagtaagtgtttgttacgctttaaagcagtaaaattattttccttt |
| | atataaccggctaatgaaagaggttggattgaattttgatgtacttatttttttatagatatttatattcaaacaatttatt |
| | ccttatatttaccatgttaaatatctgtttgggcaggccatattggtctatgtatttttaaaatatgtatttctaaatgaaa |
| | ttgagaacatgctttgttttgcctgtcaagg |
| 222858_s_at | cgatctcggtcgttcatctttaaatagatctttcttgccaaggaatgctctggcccaggagcaaggtggaatgtttccctga |
| SEQ ID | cgctgtgatctgcagcaggcttcaaatgaaaaccgactaaggattttctttcaaaaacaaatcagaagcagatgctgattgg |
| NO: 165 | gacccatataccacgttgctgactcacgttgctgcccttccatgatgttgccatctccttgagaacactgaagcaatcacca |
| | ttctgatagaaagtgcttaaaccaccactcttaggtctgctcactcttagaacacacaatggaagaggaagggtttttgttt |
| | tcactcattgtggtccccaagcctattgacactagttgcctagagtcccactgtgagtcatggtcagcctgtctgacatcca |
| | ggttgtgctattaaccaagaaggaaacagatacttggaggcttagatgacttctgcagga |
| 222859_s_at | ttatctttatccaacatttctccaaatggactgaaagaaacttttcaaggacagtgtattataacaatccctttcccagaat |
| SEQ ID | tagttgtatagggttggcccaagagatgtaagaaaaatctcgcattgctccctaagcacccnggnccttattaaagagcaac |
| NO: 166 | ttctatttccagtcgggggagtaacactaaagctacaagaaatatgtaataatgataggtaataatgtgttccaaagctttt |
| | tcaaactagaataaggaggcaaatagaagaatgagatactgatgtccacagttcattggcagaatctaaccccttctgttat |
| | cttttttaatactatttttgtttagatagaagtttcaaagaagataaaaatgcttgaagagcctgagagtaaaaagattatg |
| | ctgcaaagctatgatataaactgctcttgcagtccaaagggatacctgattaaagaagtttcttatttaaacatctcagacg |
| | caaaaattacat |
| 223095_at | tgcctgtagcattccagagctcactgcccttctagatgtgccttcccgcttggcttccagcggcttgtgctcactctgtctg |
| SEQ ID | ccaggtatgagaagaacacgtaagaccgccaccacactcaccctccctcaaggccctgtgccataggggtggccacccgacc |
| NO: 167 | tgcccccagaacttttggatactggaggcagttgcataggtctccctctctgggcaccaggactcagtccagcccaagacta |
| | ctctgggcagctcccatcccagtctggggccatttgcagactcaggaaaggatttctacagtgttctataaaagccaaaaga |
| | gagagtgggtttgggaagagtgagggtggttggggagaggggaccgatgtgcctcattgtttagtggtgattacaaatatgc |
| | ttttctggataaagtttggttgtttgc |
| 223198_x_at | gaagcctgacaccttcagggaccagctccaggagctctgcatcccccaagacctggtcggggacttggccagcgtggtattt |
| SEQ ID | gggagccagcggcccctccttgattctgtggcccagcagcagggggcctggctgccgcatgttgctgactttcggtggcggg |
| NO: 168 | tggatgtagcaatctccaccagtgccctggctcgctccctgcagccgagcgtcctgatgcagctgaagctttcagatgggtc |
| | agcataccgctttgaggtccccacagccaagttccaggagctgcggtacagcgtggccctggtcctaaaggagatggcagat |
| | ctggagaagaggtgtgagcgcagactgcaggactgacccctcacttgaccagtcccattcagatccggcttggacaggcacc |
| | tgagatggtgccaaagtgcagctgactcttcccacgacagccctgcccttcccatgaggcaggctcttcagtgagtgtttga |
| | acgtaattatgtagttttctgtttaattgaaaaagagagctatgcctttttttctttttgg |
| 223284_at | agaggcctgccgaggggaggagcctggcctctgtccacccgtcagcagtgtgaagtctgttgtgtttgagcttctcagagtg |
| SEQ ID | gaatgactccttttccttcctggccctcgggggcctctcgaggtcagcctctcccaaccccctacctcagctcctgtctgca |
| NO: 169 | ctgagaaacctccccgggtgatgtctgcaaagtctgtgctgtccgtgccccaggctgggagagctatctggggagggggaga |
| | ggaggccgagcagaatacaccccagagttagggtttgcgactccgcctccctgggacctggattgggtcagatgcctgtcct |
| | tggaggggacaaggttgactgcttaggaggcgcgacgcacagggctgccaggcctggcccctctctgggaaggttgagagct |
| | gagacgg |
| 223407_at | tgttggagcgcagggacctgtggcggcgggaggccgaggcccgcaagcagagccagccggaccctgccatgcccccaggcca |
| SEQ ID | cacgcgcatgcctgagaaccagcggctggaaacactgaccaagctgctccagagccagagccagctgctgcgtgagctggta |
| NO: 170 | ctgctgcctgctggggcagactcactgagagcccagagccaccgtgctgagctggaccggaagctggtgcaggtagaggagg |
| | ccatcaagatcttttctcggcccaaagtcttcgtgaagatggacgactgagcccctttgggggacagtggcaaggagctcca |
| | tgctgaggatcgccacatggctgcaaaggacagggttggacccaatcccagagcagaggtct |
| 223571_at | caaagtcatctgaacttccgtttccccagggcctccagctgccctcagacactgatgtctgtccccaggtgctctctgcccc |
| SEQ ID | tcatgcccctctcaccggcccagtgccccgactctccaggctttatcaaggtgctaaggcccgggtgggcagctcctcgtct |
| NO: 171 | cagagccctcctccggcctggtgctgcctttacaaacacctgcaggagaagggccacggaagccccaggctttagagccctc |
| | agcaggtctggggagctagagcaaaggagggacctcaggccttccgtttcttcttccagggtggggtggcctggtgttcccc |
| | tagccttccaaacccaggtggcctgcccttctccccagagggaggcggcctccgcccattggtgctcatgcagactctgggg |
| | ctgaggtgccccggggggtgatctctggtgctcacagccgagggagccgtggctccatggccagatgacggaaacagggtct |
| | gaccaagtgccaggaagacctgtgctataaaccaccctg |
| 223645_s_at | tttagcagtgcctgtgacgcattcctgtgctgacctggattcttccaatatgctgaacacttcctctaaaagagccccagga |
| SEQ ID | gtccatctggaggctgaccccaaaggaatgaatgaagtaaaatgctactcaaaagccctctccacaggatctcctctaggca |
| NO: 172 | ttgattaagattaagtgtgatcattgtactgatggatatattttgtgtacatgtttctcttttagttgtaactattgatttt |
| | gtaatgaaaatttcctctcctttttctaccatatctctgtttttttagaactactcaactgtgtggtaacagaaagcttctt |
| | accaatttccccaactatgttgcacatcagcctcattttccccctttattggaatgcatgttttcattgccttctcctttca |
| | aagtgtacgtttgtgtgttcatcaccttaaattatcttaatttgagacttttttataatggtttcgtaatgtgaaatcaaat |
| | actaatttaaactctggagcccataatatctacata |
| 223646_s_at | aaaatactggacccacttctttcagaagagatgaagataccttatatgccctaaagttaataccagcagtcatattttatca |
| SEQ ID | gatgtaaatctggatgtaagctcttaatgttatactaaggcagtttcttaggctgtgacacttctttgtggtacttgttttg |
| NO: 173 | tgtgaaaggtaaattttggggagaaaacaatgtgaaaaacagaacttgttctgttgtttttggcatactgtttatgttagat |
| | acactgtgttacaatacaatattacgaagatctgcattgtattttggaatttggtttcctttcagaattattgctctggcta |
| | gcattggaaacaacaacaacaacaaaacccaaaggaaccctttgcagaagattcccttgtaaatggccctgtggcatgccca |
| | gtatctgcaatgttctagaatagaagttggcaaacctctctgtttgccaagcctgcagagttgaacatgtccataaatgtat |
| | acaatctgaccctgttttttggccctgtttctggacactgtagctga |
| 224588_at | cggaactacatgccctaggatataaaaatgatgttatcattatagagtgctcacagaaggaaatgaagtaatataggtgtga |
| SEQ ID | gatccagaccaaaagtcatttaacaagtttattcagtgatgaaaacatgggacaaatggactaatataaggcagtgtactaa |
| NO: 174 | gctgagtagagagataaagtcctgtccagaagatacatgcttcctggcctgattgaggagatggaaaatttttgcaaaaaac |
| | aaggtgttgtggtcttccatccagtttcttaagtgctgatgataaaagtgaattagacccaccttgacctggcctacagaag |
| | taaaggagtaaaaataaatgcctcaggcgtgctttttgattcatttgataaacaaagcatcttttatgtggaatataccatt |
| | ctgggtcctgaggataagagagatgagggcattagatcactgacagctgaagatagaagaacatctttggtttgattgttta |
| | aataatatttcaatgcctattctctgcaaggtactatgtttcgt |
| 224590_at | ttacaaggtttgtctattttcagttctttactttttacatgctgacacatacatancactgcctaaatagatctctttcaga |
| SEQ ID | aacaatcctcagataacgcatagcaaaatggagatggagacatgatttctcatgcaacagcttctctaattataccttagaa |
| NO: 175 | atgttctcctttttatcatcaaatctgctcaagaagggctttttatagtagaataatatcagtggatgaaaacagcttaaca |
| | ttttaccatgcttaagttttaagaataaaataaaaattggaaataattggccaaaattgaaaggaaaaatttttttaaaatt |
| | tctctaaatgtaggcctggctgggcttt |
| 224709_s_at | tcaagaggtcatttgttccccatagcagcatatctcatttttaaattgaagcgaattaaataggattttactactcaacatt |
| SEQ ID | cattatactgttaatctttgctgaaatatatgctaacaaatgttaagcaagggaaactgaagacttagtcatgtggattgtt |
| NO: 176 | agcagtgatctgcattctgtaaaagaggtactttcccatgatgtaggcatgaagtggtgccagtaagcgtagagcggaaatg |
| | ttgactttagttaacattgggtttagcatttccagtgcagcattatcagtgggcctttaaaaatacttcgtaagtacattag |
| | ctttcactttgttgttaaattatagcagactcattatagagaacaagtttgccttgattttgtttaaaatgacttctgctaa |
| | gcacccagaagataaaattgacatatttttataatataagcatactttttttgtacattgtgttcattcttgaataaaatga |
| | gttctgtgttggcttgtagatacta |
| 224859_at | gcaccctgcggtttgcagggggctcctgcctggctccctgctccacacctcctctgtggctcaaggcttcctggatacctca |
| SEQ ID | cccccatcccacccataattcttacccagagcatggggttggggcggaaacctggagagagggacatagcccctcgccacgg |
| NO: 177 | ctagagaatctggtggtgtccaaaatgtctgtccaggtgtgggcaggtgggcaggcaccaaggccctctggacctttcatag |
| | cagcagaaaaggcagagcctggggcagggcagggccaggaatgctttggggacaccgaggggactgccccccnacccccacc |
| | atggtgctattctggggctggggcagtcttttcctggcttncctctggccagctcctggcctctggtagagtgagacttcag |
| | acgttctgatgccttccggatgtcatct |
| 224940_s_at | aataaaactgtgatctcgtctagagaaaatgtattcatattacaaactgctcttccatatttatgtaccatattataccttt |
| SEQ ID | ttattattgttataattattatgggtatttctaattaatatgatgttgaaacctgtttggcaccttctggaagctaccaaaa |
| NO: 178 | aaatgacactccattgaagtgcttaaaag |
| 224941_at | gtctacttaagacttctggtcatttccaacttatagaggaagggagtctctaaaatctcttcttcagaaggcacctcacttc |
| SEQ ID | tcagacttaaaattccacatcaagtgttccattaaaagaagataaggcattctgagtgcaaacaaatgggggcttcttaaac |
| NO: 179 | tacacaccagcagtcagtgaggaaaactttgaacaattattgagttgctttcttgggtctctataatcaataacctgtctgc |
| | agatatctatcta |
| 225150_s_at | gtgagagagaaaggtgctggcataggatctgcccagaagagaaaatgacccatgcgcagttgggctctggatacggcgctgt |
| SEQ ID | ctatagcaagttggccagtctggcctcctgttcctctgctggacctggggtaggctgcaggggtgggcagaagcccctctta |
| NO: 180 | aattgtggttgccatggtaccgaggg |
| 225230_at | gactgttgttggttatctggtgtggagtaagtgcacttagcatgctgacttgctcatcagttttgcacagtggcaattttgg |
| SEQ ID | gactgatttagaacagaaactccattggaaccccgaggacaaaggttatgtgcttcacatgatcactactgcagcagaatgg |
| NO: 181 | tctatgtcattttccttctttggttttttcctgacttacattcgtgattttcagaaaatttctttacgggtggaagccaatt |
| | tacatggattaaccctctatgacactgcaccttgccctattaacaatgaacgaacacggctactttccagagatatttgatg |
| | aaaggataaaatatttctgtaatgattatgattctcagggattggggaaaggttcacagaagttgcttattcttctctgaaa |
| | ttttcaaccacttaatcaaggctgacagtaacactgatgaatgctgataatcaggaaacatgaaagaagccatttgatagat |
| | tattctaaaggatatcatcaagaagactattaaaaacacctatgcctatacttttttat |
| 225475_at | aagacattccactattatgcgtaatgctcagctttttgtaaagaaatatttaattgtattttgtgtttatacaggtatttca |
| SEQ ID | cacaataatttgttcttaatgcagccactataacttgataagtcattgcactatttaaaaagttttagtaatatcatgaatt |
| NO: 182 | taatttgcttaagatttagtacatttcagaacttttgaacttttgacaaattgcattgggaaaagaagtctgttaatagtga |
| | tttagtctccccgcctcattcccacccccaacaaagcactatcattttcatttggaatgggtattttctgtttcatgatgta |
| | ttttcaaatagagttcaggatctgcaattcagttcaacacaagtttgttgagctttaaaatgtatttgaagtaatatttaaa |
| | taggcatttaaaatttcaaattagatgttaaatttatgcatagtaattttgcactgtaaaataattcccttctcccattcct |
| | tgtctgccattctgaatatg |
| 225531_at | cagagatctgtggggaagctccgcccagccacactccttgggataatactagccggttctgcctgattccttttccccngga |
| SEQ ID | gccagcctagggggcccgggactcctctagtgagccttgactgttaggtaagagacaggaagcagacaagccaagaggttgc |
| NO: 183 | tgcagctgcccccaggaggaaacgggcagcagggagtgtggcccagcccccnnactgtacccctccaggggcccgagccctt |
| | gccagcccaatgacaccttgaagtcaccacttttcctttcttgcccgctaataaaacctatttaaacaggaaattcatacca |
| | aatgcaaatgggttttgttttccttggcattttgttgttccgatcacagatttccctgccagggtgtctgtggttatcagct |
| | gcaggctcagcttggggcggccgcttcacacaagccactctgtaccacgtgccctaccttagtgacgggag |
| 225736_at | cctctggatattgatgcctcgggtgtggttggactgtcatttagtggacaccgaatccagagtgccactgtgctcctcaacg |
| SEQ ID | aggacgtcagtgatgagaagactgctgaggctgcgatgcagcgcctcaaagcggccaacattccagagcataacaccattgg |
| NO: 184 | cttcatgtttgcatgcgttggcaggggctttcagtattacagagccaaggggaatgttgaggctgatgcatttagaaagttt |
| | tttcctagtgttcccttattcggcttctttggaaatggagaaattggatgtgatcggatagtcactgggaactttatattga |
| | ggaaatgtaatgaggtaaaagatgatgatctgtttcatagctatacaacaataatggcactcatacatctggggtcat |
| 225882_at | gcaccttacatatttgatgctcaggaagaaagtgcaagaagatccctaatagaacattaaagattcttaaaagtttttgaag |
| SEQ ID | taggctgcttggggtgaccagccccacccttacatctccatagttggtacagttagcttgtagcagctgaagctgatgcctg |
| NO: 185 | gagatcactgtctgttggtctgatctcagtatcatactgagacacctcccctgagccttacctacttaaattggtaaccgtc |
| | ctaccaaaatttgtcaattttaatcaagtgaggcaagttgcaagggagccagagatacgtgaaaaaagaaaagcagaaatac |
| | tgatactttctaagaaagaagttgtaataatttctttggcacattgacttactgatatcttttgaaatgcatagangactct |
| | tgtgaaccaaagagagcagtagtggttattccccggcgcaataaaaatgcc |
| 226042_at | ttcccttcagtcttaaattgtctccagcgatgggaagaggccaggnactgtaacccttgtgctgtgtattctctgagcctct |
| SEQ ID | gctcactctcagggccaagcagctcccaagccggggccctctcttggccaaaatctgaggagcagtctaggttacaggcttt |
| NO: 186 | ttggtaggtaggttctggctgcctgttaatgcagttaggccccctgattaggtacagtgagaaacaagctagaacaaccctg |
| | gcccagaagactgtccactccagcaagatccagggatgatagccttgcagggccactgggagtttgtgcccaagcttctccc |
| | tcttctctccccagggggcactgggactggtccctgccctcatccttagcctgggccttccccagaggtattaaagagaagt |
| | atgattcctctgtcttcagttcttttcaggggcatcctgcccatagtacccagttcccaaggggcccccagtcacgtggtga |
| | agcctagcactcatgcagctct |
| 226043_at | agtgggggggtggtcagtggaagctggggaggcttcactcagctcaaccctgcagaccccccatatgagaacccccctcctc |
| SEQ ID | ccaccagctgggggagatgacatcactgctctctccatggggagggggctcacagggcaccaagttcgggatcctaggactg |
| NO: 187 | gcaggacctgctggagcctgagatgggccccaggggcctgaggttgcctcctcctgtccagacccagccttggcacctccca |
| | agactgccaagggccctaccatggccccacagcccccagggctggcagttccatctaggagggtgcctctaggccccactct |
| | caggctaggatggagaggcagatctgggcctggngaggtgacctgcttctggaggggcagggccgcacccgagagcagggac |
| | aggtgcccgaacacagggtctccaggacgtagcgcccccccgcatacttgaatgtatgtgcgtatttattgctcacgtctgt |
| | gccatgttgtcaatgggtcctttccaacccaagaggtacatttg |
| 226118_at | aggagacggacctgtgagtctgaccnngagncggncccnttcaccttggctgggcctggtcctggtccttaggttttgtcag |
| SEQ ID | gttgtccttgtttggatccctcaactaggtgataagcactggagggggatgacccgccttggacgtgtttctttaacctcat |
| NO: 188 | ccatataatagggccgtgggatggttgtagaggtaaagcaggatgatggtgttttaagaccagagcttgggaccagggctcc |
| | tacacctaattttctctcctggtagctgaacaaaggtctaaattagcttaacaaaagaacaggctgccgtcagccagagttc |
| | tgaaggccatgctttcagtttcccttgttgacaattgctctccagttcctatgaaagcacagagccttagggggcctggcca |
| | cagaacacaaccatcttaggcctgagctgtgaacagcagggggttgtgtgtctgttctgtttctctgcttgccgaactttct |
| | caataa |
| 226152_at | ggtagtttctgaacctattgacattgttcaaaatggatcatgtgccatattttgttagttgacatctgagttttcagtaaaa |
| SEQ ID | tgattatggaattaatcagcaaatgtagaagaatatattcaaagttaaaattcagtggcagcacagattatttttatcagag |
| NO: 189 | ctgtaaagaaaacaactgtccttttnctccccaccacccctcctgccccactttggcccagaaaccaaatgtgaacttcctg |
| | tctcccacctcagcactagtccatgccaggacaccagctgacaatttcttggttttactgtcaataattgtaccatgtgatc |
| | aattactgtcctcacttagaacaaagcctgagtccgagaatatttatattttaccaatatatgcctgttacaagagaaggaa |
| | atatgagttatttaagtttaacttttttatgtgaattcagagtttatttatcgagggaaatatgtacaaagaagcttcaaat |
| | ggaatatttaccgacattccttatacatgacagacacttggctacatgggaa |
| 226207_at | ccagccggagtcgggcatcaagcgactgtttagcttcttctcccgagataagaagcgcctggccaacacacagagaaacgtg |
| SEQ ID | cacatccaggagtcctttggacagtgggcaaacacccaccgcgatgacggttacacagagcaaggacaggaagccctgcagc |
| NO: 190 | atctgtgaccttggcccatctccaccctccaacctggactgcccgccaccagcgcctgcaaccgaactgcagcccaggggtc |
| | attgctgcctcaagcctctcggtgcagatgcaccctgaaaactgacccctcaaacagactgtctgatttgaggatggacatt |
| | gaaaaactgacgccaaactctaaagaaatgtttatttatacccagggctatcactgtttctaatagatgactctgatcccgt |
| | aggatatatatttaataatcccacaaacggaggccagacttctgcgttaacttcagtaacacaagcttctttaagccaaata |
| | catcacttgccacta |
| 226470_at | ctggccccgagcttagggatgtgcttgcaaacccttctcaagggtctcacaaccccaacatcttcagactggcctgacctgg |
| SEQ ID | gccttgtcttccagttcctttctcccattcccagcctcatttcttaaatgactaggaattttttaatggaccatcataggga |
| NO: 191 | gggggtgctcctcttttcccaccaggttgaggtgggggccttgcatcgggggtccccagggtatg |
| 226515_at | cttcctcgcagcaagcggctggagatagagaagagcttactggtgcgagcgtccgtcgaccccgtcgccgctgacctagaga |
| SEQ ID | tggcagccggtctcaccgacatatttcagcatgatacatactgtggtgatgtctggaacaccaacaaacgccagaatggcag |
| NO: 192 | actcatgtggctctatctcaaatactgggaactcgttgtcgaactgaagaagtttaagagagtagaggaagccatactagaa |
| | aagtaagacaagagtgaaatcaaactgcttttagtgactcgaggccaggcagtcatgcgccttctgggtctccggcgtcttc |
| | cgttcccgtgctgcccgtgtcatggccacaccgtcacccttcagcagcgacctccactcccgccaccgtctgagcagaagtg |
| | caccgaagcctcagagacagagggtctcctcccgatgctctgccgctgttggggatatggtttcttgaagcatttttaggct |
| | gccagtattgtattaagcagaacagtataacctcgtattttagctccag |
| 226538_at | ttaaccagcaagtttctgctttttaaggttacttttagaataaatcatcagggaaacagagaggatgctttgctttgggttg |
| SEQ ID | tagtcaaaaactgattaaataatttaatgtctctggcacacactaaaaaccatacacttcagttgtgatctcagtggcatat |
| NO: 193 | ttatttggttaggtttcgttacatttattattacagatgttcagttgaccaagtagttcagtgttttctttcctttttttgg |
| | aaattttagtttgagtttgtgactgcagtgttcaagaactcagcatccttgttttctacaaatactgattaaaataaaatgc |
| | tgtaaaatgtgatgtaaaacattatcatgatcttcccatgcctttgttgtacttgtgccgaagtgttttgatattcctttgt |
| | ctggaagaaaatgtttgctttcattttgatcattttgttcaccttggaatcaacagg |
| 226854_at | aaaggattttgtggagtcgccccaggcctgacggcgttaattatccctggctttcatcttgatgctcttgcaggggaggctc |
| SEQ ID | aagatgccttgtggctcgacccctgcacggagcccccagcccagcctccccgtgggttgaaaccttgatctgggcctgactg |
| NO: 194 | tggctgctctggggacatgccctcgtcctttgctgaagctgaggctccagagggggagtcactgccacgaaggttgcccaga |
| | actttccttgctgcaaaaagccccaagacttctccctgccacacacacagcttttgccatcgcgttctaaaagctgacagct |
| | ttctctccaacactgttctccctgagtagggt |
| 226971_at | ggaggcctgaatacaggcggtcacctaaggtggtgcgtacagtgttgggccacatgtctagtggtgccaggactgagagatc |
| SEQ ID | acttacctccaccggttacccaggaggtaacagagactgatccacaatgttcctgaggtgtcttgggcacccataggcaggt |
| NO: 195 | gacttctggcttagggcagggttcaggaggctgggcactcacagtttctctttggtccccacagaacatgtt |
| 226972_s_at | gtttgggttgtggaagcctatggtattcttggctattgcagctgtggctctgtatgtgttacccaacatgcgacagcaggag |
| SEQ ID | tcagagttctgcctcatggagtgatggcagaccttggccagcgcgagggcagatccccagtggccaccaccctcagctttgg |
| NO: 196 | gcaggacacactgtgccagaaccctccccatatgttccatgtgtccccatctcctcagcctcagtcacccaggctgaaaagg |
| | cttgtggggagcggctgacttccatctcctgccttgtgtaagaacctgagt |
| 227073_at | tagcattagctttacttggagggganaagaaacaaaattacaccttaaantctattagatagactacaaaatggatttgatg |
| SEQ ID | tattcttacttttccaaagaattttttccacctggaataagaagagaggactagttganacatttgagctggagaggcttat |
| NO: 197 | gggcaatatgaagtgggccaaattcttgcaatacaccctattcaattgaaagtacagtgtctaaggataagaatacttcttt |
| | aaagaccaacaattgttttaatgcaatcttaattagtaaatggtttacattttttctattgttattggttttaaaatttgct |
| | accctgaattctgaaatattataagagttaataccaaaaatacttttaatgtctgacatctcttacatttcacatggttctt |
| | tttattcattgtaaataaaagtaaacttggataaatttgagaataaactttgaattgttgcaaactatgattatcaatttgt |
| | aaatttaccctttgacataataatg |
| 227119_at | agtgccatgtaattgtagcttgctagtgtttaatgtttaatagactggttctgtaggtgttttaaccatttaacactctctg |
| SEQ ID | ccatccctggagaaagtggttctactcttactgaacacattctctctgacaaaatcaccagctgctttatttttctatttat |
| NO: 198 | tacagttaaacagttgatgaggtctgaatcttgaccaaaactgctcagctgagatgtttttcacaatagacactgtacaaag |
| | tgtgcgtgcaaaaggacacggttggtagtattttttcattaatgtgaacattgactaaaaaaaagcagtcctgccttttaaa |
| | tcttgtggcagctcagaagggaggtgcttaagaaccttaactactatgtcagataacaaaatatttttttccattttggaga |
| | ttggttactgctcacacatgatgtatagggctaaatatatgcttgtttccttgcacctgtgtacttcccctctctccctccc |
| | tttccttcccctgtaggcaataaat |
| 227135_at | tcctcatttaactttacaaccttgcgaagtgggtccaggagatttggagtttgtggtaaagccagtaatgggcattgtcctg |
| SEQ ID | cattcccttcccttcatggtttgcctcgatcctctctaagcttctatcctggcctgaataactcaaagataattggtctcag |
| NO: 199 | agatcaagccatatcctcaggccttatttccatcttctcatgattctgccatcatacctttgcttctccgctaatgaaatga |
| | gctggcaagacctctgttcattgtgaagtgcttctgaaagagcctaagaaaaaaggctcatctgaaagaaatggagaactct |
| | atttcgaaccaagcctgtttgaatgtgtgttagtctgatctttgatcatgtgtttccatgtaatgggagtctcgttttttat |
| | aatgtttctaacgttttattgaaaaacctatggccctccttctttctcaatagctactttcttactgctttttga |
| 227165_at | ggacacccagtagaccctgaatttcactctctctaaaaggttctgagggctcatcctgggccaggggccctcctgtgcactg |
| SEQ ID | ttagctatggccacgggagcctccagagctgcctggtagcttcaggttgacctgcttatcaggcctacgatccttctgattt |
| NO: 200 | aagtacagctggaaagtattatctaattaagttcatgatagtgcttttggagaacttgtcaaattacagccaatgagaaaat |
| | aaggacctagcataccgtggagaaccattaaaaatttgagaagaaacaacaagtattatgtcaacttacttcaaaggcgtag |
| | ttttgggaatttgatgcagtaaagattaccctgttttatgattgttccttgaaagtcaaatgggggacctgtccattgtgct |
| | ctattaatcttgtcagaaaactgtcaccaaaacaaaatttgagtttgtccttgttctag |
| 227263_at | aactcactcattgtcaggtgtccgtggagtgtttttggcatggtgacctgtctgggcccagcatgttgcagatgtgtattta |
| SEQ ID | tgcgcaatggtatgcatatctctgtgtgactgtcagtgttgcaagctggctggatccaaccatctcttctgaaataatgcat |
| NO: 201 | ccaaagggttgatattctgggggaggtcactgcagaaggatggaactgacctttattccccagtgggcagttactgagcttt |
| | cctcctcagagccatgctggcagccctgggacagagaacggtgtggctttggctgcctctgcatggaatcttgccccggact |
| | cctgaagactgcacaaggaatgaggaagatcagggacaacctgggaactgaataactttcaaagccagtgctcagcttctct |
| | gctccgtactagcgtttacaggtcttaattcaaaccagatgcctgtactagtttttagacccca |
| 227265_at | acatctgctagaaccttttgccttaactattcaccaatatatgctaatattcataaatatggattgactgtttacaaacatt |
| SEQ ID | agaatcttgtcttggttccattttgatggctaatatttgttatcttaattaagactatttctgaggtcatgattacttgaaa |
| NO: 202 | atattgactaaaactgggtccttagaaattccaggtggagctgatttacctatgactgaggggaaaaaaaaatcaaatttta |
| | ctgataatagtaatgctccaaatgaattaatgacacatctgttcaataaataaagagcttaaatatacaaaacataagaaat |
| | ctgggcaacaaaacttgtggtctttacttttgaatagctacccaagaaaaggttttaaaggtaaaagttatgagtaatgtca |
| | tcacaataagctcttgtttaaaattcttttcttttatgtataattaggtttatgtttcatgtcttt |
| 227908_at | tcttcaccctacaacatctatgttaggtagaaaagtatgtggatttttaaaaatcatctggtataaagagtttttaagaact |
| SEQ ID | atcttcatcatctntagtatcagatngtgcttgagaagttaggtacaatgtaatgtgattcattgctaaaaacaaaatgcct |
| NO: 203 | cccacaattgcagactcactcattttaccaaactatggaatttgtcaacaccttttcttgggaccaaggaagcaaagtcagt |
| | ggataccgtgtcctgtagacatgtcacttgtgataaggcacggacaacatgaactggcaaaaacattggcatttggtcaaat |
| | gcttatgagctaaggatagaagggaaaaaatagttgtgtgaatgattttacctcttagttcttacgaaggatggttatcggg |
| | ctggaaaaatgtttattggactgatgctttggagcctctcaatgaatgtaataaaaaaaatgtgtagtgagcacaaatgtat |
| | ggatttgcagcacaatccaactttga |
| 227927_at | tacctctgtcgacctgtgaaactgaacaaacagcttatctgcccctaatgtgaaatgatgggacagacatagaataacnact |
| SEQ ID | acagtgattctagttcaaaatgagggaacatggaggggataaagaagtcantaacccaaaatagtttggaaatggagctggg |
| NO: 204 | caaaatccagcaggagtttcttagttaggatccacagcctgggactgaccctctgtcctgtgggtctttgcctctgggctct |
| | ctgctctgcatttcttgaaaccattatta |
| 227929_at | gagttcatgtgtctaatcattatctgtggtttgggggncnccattncattaaaatgaatgagtcactaagtgagtcactgta |
| SEQ ID | nataaaatacttggaaattgtaaagtaatatncaaaagatattaacaaagtattattcatggtaaacaaatcacatcagtag |
| NO: 205 | caaacacagggtgggaactcaatcttatgttatagcttactcttaagaagaatatgtgaagccaggaacatggttaaaggta |
| | cagaccagaaaatttctgacatgtgataaatatttcagtgacttttcagatttatttcttgttagccgctgtgtctatttgg |
| | tgctacaaaaactgaaagaaacaaaatccctgatgtaagggcttataataaatacacagtttggagatgaactaaggatatt |
| | ttacatttacgggaaaggattggacaatagtatcattttctcaccatttgcatgtacatcatgtctttccaattgttttcat |
| | tatttttctgaaagagctgcaaaattgtgcagtggttcaacctgaccaaagtggtattatgctgctgggaagtaa |
| 228017_s_at | gcctgcgtaagtgaggaaacagctgatcctgctcctgtggcctccagcctcagcgaccgaccagtgacaatgacaggagctc |
| SEQ ID | ccaggccttgggacgcgcccccacccagcaccccccaggcggccggcagcacctgccctgggttctaagtactggacaccag |
| NO: 206 | ccagggcggcagggcagtgccacggctggctgcagcgtcaagagagtttgtaa |
| 228054_at | aacggaatacctgctaggttccaggaatgagctcacctaacaganagcaaatgtgtctggttagatctcagcagagcccatt |
| SEQ ID | ctgcaagacctggctgagccagatgagagggtgggccctgtgctggggggnccttgggtcacacacaggaaccgagacctgg |
| NO: 207 | cttccaccccccagtcacccacttgggttatctgctggaagttatcgataggactgtgtggccaaccaagtgcttgtgagat |
| | cactgacactgcaaaaacaaagcaaactgctccgggtaccaggacttcctccaacctggcaagggtgtgcgctgaggcgggg |
| | cttgcaggtgagggggctgtatgcttcaggaactaactaaatgcatgcagaaggtaagaggcatgatgggaggtgttcaagc |
| | acagcaatcccatttgggagttattttgatactgcgatgagtaagggtaagggcgcatggaatggggcta |
| 228071_at | aggagttggtggagctgatagagaaaatggtgcagtgcaacgaaggggcttacttttctgatgacatatacaaggacacaga |
| SEQ ID | ggaaaggctgaaacaacgggaagaggttttgaggaaaatctacactgaccaattaaatgaagaaattaaactagtagaagag |
| NO: 208 | gataagcataaatcagaggaagaaaaggagaaagaaattaaattactaaaattaaaatatgatgaaaaaataaaaaatataa |
| | gggaagaagctgagagaaatatatttaaagatgtttttaataggatttggaagatgctttcagaaatatggcataggttttt |
| | gtcgaaatgtaagttttattcttcctaatttactgtgatttgttaatggatgaattgtattttgcaaagatagttagagaaa |
| | tacctccttcc |
| 228094_at | gggagaaacacatttactccccaataattgtacgggaggtgatcgaggaagaagaaccaagtgaaaaatcagaggccancta |
| SEQ ID | catgaccatgcacccagtttggccttctctgaggtcagatcggaacaactcacttgaaaaaaagtcaggtgggggaatgcca |
| NO: 209 | aaaacacagcaagccttttgagaagaatggagagtcccttcatctcagcagcggtggagactctctcctgtgtgtgtcctgg |
| | gccactctaccagtgatttcagactcccgctctcccagctgtcctcctgtctcattgtttggtcaatacactgaagatggag |
| | aatttggagcctggcagagagactggacagctctggaggaacaggcctgctgaggggaggggagcatggacttggcctctgg |
| | agtgggacactggccctgggaaccaggctgagctgagtggcctcaaaccccccgttggatcagaccctcctgtgggcagggt |
| | tcttagtggat |
| 228128_x_at | gatgttgaaacctgtttggcaccttctggaagctaccaaaaaaatgacactccattgaagtgcttaaaagctgttctcataa |
| SEQ ID | gaattctactggcctattgtaaaaaagaaaaaaaaaangaaaaagaagaaagacacaaagaaaataatctaaacaccaaaaa |
| NO: 210 | ctaaacacaattccaatcctttttctgtacctcacgcgcataaattngctgctcctattttttttnctgttnatgtgttttn |
| | atggatctaagttaaatcttttggcaatatataaaaatgtaaatagtaaactttatttattaagaatgtcatcttttttaat |
| | ttatatttacacaattgttcatctaatttattttttctatacagttttaaatactcagacatattttgctgttcatgatatt |
| | tttatcctgttctcatggatttgttttcccatactgttttctctgatctcaattacaggttggatctcacaaataataatgt |
| | cagagacagaaatattttgccactgttgattactatac |
| 228492_at | aaccaatacacaaaattttcctatgtcagaatgtggtggagcataatagattgtatttggtgtgcttgcgattttttttttc |
| SEQ ID | catagaatttattaagtgaagtttctaaaactttgcttctcctgatcccggtgaagtgtacatcataagaatccatagtact |
| NO: 211 | ttgaagtaccattgcaccaagatgtctgactgaattcatagtcacacttttatttgaaagaaagaattgttgtagttttttt |
| | tcattattctaaaactcttgttgttagatacaagatttaattaagatctaagctcctgcttatttaatgtaattctaaggta |
| | ccattttagaaaaaacatttgttttaagattccaagaaacctgtgagttaatactatatttaaaagagaattggtaaatttt |
| | gaatgtgtgtaatattttggaacctgtttaaaaaccaaatatacctgcaaatagatacagcctatcctatactattta |
| 228565_at | tatgtcctcagttttacttctaccaaaacatccctgtatgtgtgtgcatgtatgttggcgtgtgtgtgtgtgcatgcatatt |
| SEQ ID | agtaaatgtgtgtttgcatgtgtgtgttggggagtgtatgtgatctgggtgtttgtttatctctgttattattcccctttag |
| NO: 212 | ctttattttagtcaactctacattatgatgaatttcaaaatgaagctgtattaaaataattgtaatataacaattcaatctc |
| | acatgttactgcagatagttaacttttgctgcaatctattgtacatttgcaattttctgtgttagtaaacttagcagaatct |
| | ggttatttatttttgtgtaggcttaatgttcactgaaagataagtcaattactgttagtaaaaaattaaggtactctcactg |
| | cagagatttaaggcctgggcctaatgtgctgtattatgaagccttgtgac |
| 228604_at | gaaatggtggtttccttctgataagggatacagtggaccatgtcgcttatatatcaccctactaggggatataattttccct |
| SEQ ID | tctaagcaagggaaatggcagtgctaaatagttttgtaaagtttttgaatgagaagcttttaggtaaagataaactgtcata |
| NO: 213 | atatttttcagatgcatttgcattgactatgggagaaaaattagggggaaatgacagtcatggtgtttttttttaattttaa |
| | ggactgaaattctgttacatgatgtatgacaatataaaaacatacttagttttatactaaatctttttttaaggtcttggca |
| | tttaatataaagcaaattcacacgttttctaactttccataagttccaaaaagggaaagaagaaacctcagtcttgaaattt |
| | tgatttttaaaaatcatgacactgttttaccatgaaattgagtagctaacttttggtaacacct |
| 228812_at | gagacttcattggtgatacactcaatttttactgggtaattagctaataatgttggtcactgtctcacagttcaagtagctt |
| SEQ ID | taagatgatgtggcaaggaaaacacaaagcttttgggtaaccagcgttcttaaatgtatggtttttgaccaggtgaaccctt |
| NO: 214 | tagaagtgatttctgttttaaaagtatgtacttaaaatacctttggctgtgatgaatgtagatcccagcagaataccaaaat |
| | cctattttttttgactgagtatttgtagatgcttaatgactgaaatgaatttggaggcactgatgaaagtgatttttttnaa |
| | gttctcaggtactgttcaattat |
| 229022_at | gaaacacttttagagcacttgaggaacctaaaagatgactggttcagcattttgtgtggtagataagaaagaaattatcaca |
| SEQ ID | aaaaatcagaaatgaacagtgagagaaaaataggaccccagacagtttataccttccatttgctgttttaaaagtgtgagcc |
| NO: 215 | tgccaagtcaacaagtatgcctttagcgcacatgtaaatagcctgcacttcctaaatctcgtgtggcctcccatggttacat |
| | tcttcaaaggtnaactgagttgagaggaagattcagcatttaaaagagaagggttgaaaaagatnntgtgtgtgtgtgtgtg |
| | tgtgtttaattggcccagggttacttaaataaatcataaccattttgccacattctgtaactgtttagctaaggtcaaatta |
| | agtttaccctatggattttgtttcatcttttgtttcgtgtatatactgtttgcctttttca |
| 229026_at | aaaggcccactgataatgctgcactggaaatgctaaacccaatgttaactaaagtcaanatttnccgctctacgcttactgg |
| SEQ ID | caccacttcatgcctacatcatgggaaagtacctcttttacagaatgcagatcactgctaacaatccacatgactaagtctt |
| NO: 216 | cagtttcccttgcttaacatttgttagcatatatttcagcaaagattaacagtataatgaatgttgagtagtaaaatcctat |
| | ttaattcgcttcaatttaaaaatgagatatgctgctatggggaacaaatgacctcttgagatttacaaccccctttataaaa |
| | gtgggaaagctgcctccctaaaaaaaattatgtccaaggttaataccgtatctttttttgtagttttcttatttcttgattt |
| | tattggcacctcccaggcactttggcatgtgctcctgtataaagtgtagttactgtgcctgtagagttagtggcagctgcag |
| | agtagttataggctgacaagtccacttttggcttaccatggagatctgctccaacacatgc |
| 229047_at | cctgtgatgatagcttcttcccatgtggggattaagggtagggagtggggggaatggtccaaacccggaaggagctaatgga |
| SEQ ID | gaggatagggccaaagtgggacagggcttggatggtagaggatggggtccaggaggaagaggagtctagcaatccaagcgca |
| NO: 217 | ggggtcagtgctccgagtcccagggctcagaaccagcagggcgaccacatgagcgagcccagcgccgccccagtggcggntc |
| | ccgcaagcatgcccatggccagaggggcgccggcgctgtagcagggatcctcccgcactatcacgtgcgtcacgccagggcc |
| | tgcgtagggcggtccgtagtagctgcggacatacgtggcctcgtgtgcattggggggcaccacctcgtagtagtcttggtac |
| | gggctgtagacgcgcaccggggtggagtt |
| 229094_at | tcccctagtgaaatccatctgtcctgaagggaaccctgggacggggtcaaggaaaccctgttcacccccaccacggggtcag |
| SEQ ID | gtcttcaccaaagggaggccgcacggattcccagtcgcaaacccaaagccttgctgcctttgcctctgcttnccatagttgt |
| NO: 218 | ttcaatgtcttttttaaaaatcacatacactcgagtaagactgagtctcctcaccgaagagatctggctgtatcccgagtct |
| | ctgaaacctttgctccagtccngtgggancgtgccgtcccgaggatgtggagccgcaagggctcgccagagggatctcagga |
| | gctaggcctcaaggagcgctgttgagtgacaggtctgatgcagtagcttttactattggtggaaatcgatgttttttccttg |
| | aaagtctacctttctaagttcagt |
| 229308_at | gagccataaaattgaagccagtagcttgaacaatatggaggccttcttactgtagggaagaggtgtctagcttagaaggatc |
| SEQ ID | acatttgatctagatgagattacccatagcagggaaaatgaatcatcacctaccaaagactgtacggaaaggtgtgttattt |
| NO: 219 | tcaaaattgcattttagtttgcacacatgtaaatgattattctatgttaatctaattgacaattcagttagctccgcatcct |
| | aagacttaaaactagcaattcctatgcaaatcatctgcttaactgaactacaaacgtttttcattaattcat |
| 229575_at | gaaggctatgagttgctgctggccccatcataatcttttttgtttagcagaagtcaggaaacgaatactggtacacttacat |
| SEQ ID | ttcttggaagagcagcagaaaccttgggatatccttgtgggtcaaggaggcaactctcctcacggattccctgatttgataa |
| NO: 220 | caacatactcatggaaacaccaatccaagttttcacaagtttctcttaaagttaacttaagacttcctagaccaagaattcc |
| | taccacgcaaggcctgtgaaaatattgtaaacttaatatccgacagggagatattcaaagatgccaaagtacctgtttttat |
| | aaatattaccacatggtttaagatttgacttctcacataaaatgagtaaaaataacaatgatttttctgcagtaccttaatg |
| | atgctgtaattatgaagcagggttttaaaattctgccatgtagtgccttattt |
| 229598_at | atttttcttagctaaatctggcaactgtgnctatttcattgaaaacctgaaagtgtacaaagaaggaagaagcagaatctgc |
| SEQ ID | catatgagtaatagaagtgagcaggcccaggactccctaagtcaagaaaccaagaggcgtcattacggaaaagagtaactca |
| NO: 221 | ccctgtgtgctccttggtagttctccctcagcgatgcccccatgttatgaatggggaaaagttcactgaagggttcatagtg |
| | aagaaactttttggatgatttctgttggtgggttttggataccttcaagggatcagaaaataatatacttaggaaattttgg |
| | taatgtcatcattactctctacattattattatgacggttacaattgttaaatctaggtggtgggtatgtgggttatattgt |
| | acatgatttttaacttgtctgcatgtttgaaa |
| 229623_at | caacccaaagtctgaatttcttgaggaaaaggtcaatgtcttttcatctctgtattgttccccacctcttaacacagtgcct |
| SEQ ID | ggcacatactaggtgctcaataaatgtctgttgaatagaattattaataatttaagagtaggaaaaaggagtgtcagagaga |
| NO: 222 | gactcaaagatgagtgagagagcatggaagatggctgtttcatgtgagacaggaatggaagaagttatgaatagggatcaga |
| | tgggggagtgagaatccctgtaagtaaaatgtgaggaaaagaacaagctgagaacaagattctcctgtcaaaaaggcgtctt |
| | actgtaaatagtccaaggtgacatttgttagttttgaatactgcttttgggtttctttttttcatttttatattttaaaatt |
| | tttatcaaagaacaaagacttatgtagttttcttttattctacacaatccaaattaaacagcttttggtgatgcaattgtac |
| | actttcttaagaatatatctaataccacattttagcagaaccaagcaatgactgacattattcattgggatctggcc |
| 230164_at | cccagcctccaacctaatttgagtttcatttgtatttttttcatcaccttacatgtgttaacagctgtttcaacataaactc |
| SEQ ID | cattataatctatatacatttaaagaccgtgtttacataatctcttctgggtagaaaatggaaatacttaacctttgcattg |
| NO: 223 | gtccctttcaggcttgaacaacagtggctgtatctgcatcgtggggttgctggtggtagaacactttggtgttaggaaagtt |
| | tggaaaagaggatatccctgtattaggccattatgattagagataagcagcctgggagaaacatacaagacctgtggctact |
| | ggtagagaattggaataagcttccaacaatggactgtagagattaatggagattgtttagtgggcccatggctaggtggggt |
| | attaatacagttgaagttatgttncccttggcacagatctttgagaatc |
| 230330_at | gggcctctcacaacatggcagttatttgtccccagagcaagcaacaccggagggcaaggaagaagccatgatgttttttgta |
| SEQ ID | acctagcctctgaaagtgtcataccaattctgtattttgttggtcacacagaccaagtcaactacaacgtgggagactccta |
| NO: 224 | cacaaggcatgaattctaggaggtgggcatttttaagtgtcatctggaaggaggctgtcacaacctggaa |
| 230521_at | ggcctcctcccaaggagaacatgagaccacttcatatctggaactctagaaacactggctgcagcaatcaacctcctgtgcc |
| SEQ ID | aaggctggccccactcttgtagcatggacactgctagctgggttcaaatcccagctccagcagttgccagcgctgggtgacc |
| NO: 225 | tcgagcaagtgactactcctcactggattgtaggagaactaaatgtgatagtcattatttacagttcaccacacgctcttca |
| | catccgttacctccctggatcctcaaaataacctca |
| 230760_at | aaaacgtgacactttacatatttcatatttttcatatagtctggaggtatacacagttgttttgtttttaaccacggtattg |
| SEQ ID | aaacctttaaaaggtaattaagcatttggtcaagtaaatatagaacatttgtataaagaaagaaatgaaattgtgcttaatg |
| NO: 226 | ttatatactgttattatttgcaggctggttttaattcttaatttgattagcaaagctaaaaaagtggatgttgaagttgaaa |
| | gttttaaagaggtacaaaatcttacaaggacataaattattatttggttgaaaaatagcctattagatattgtatgtccctt |
| | cctctgtacaaattgtaaaatacttaaaataactatgaagaattcatataggaagtgtgatactattgtaaat |
| 230968_at | gtgattaaacattctagaccaggcttgttgatatgtatgccaatagnctagaatttttggcttagtgtaaaataaaaatgtc |
| SEQ ID | ttttctattgtggtctgatatccgtttctgtaataagatcagtttgttgtcctctgtgcaccagtggttttgcccttaattt |
| NO: 227 | tttttggctagcatcaccaagatctgtcatccagagctgctgagaaaaatacatgttgnccaaacttttcttaaaattgtgc |
| | tgccagtggtattttcccagatgtgaaaaataataatctaataaaggattaatatctaataacaataccattgttgaacatg |
| | ctcatggaatgtccaccttcttctgattccnttttttgtatttgaaaatgcaatggtgtgttccaaattattgttggtgttg |
| | ttaatgtcatgactctcctttgaatagaataaaataaccccttttgttttgtgttttctactgaattagattttcctctagt |
| | cctatgtgaat |
| 231084_at | atagcaaattatgccctaagctgcaatctacgagaagagttggtagctgtctcagagagaaaagacatctgtaatgcaatgg |
| SEQ ID | ggtctaaactgacttgtgaaaagattgtcaaagaacggtatgaaaacatgatgcaacagcagaagttaacaaatatttcaaa |
| NO: 228 | acaacaagctgaacagatttcaatactacagactgaagttgaaagattaagaatgaaaacatttcctgctcttgttcaaatg |
| | taaaaacgctggcaggaaaacacaaggccaaatcaatcatttaaaaaatcatttcatttgggtaaaatgatttccttttctt |
| | tcttactgggaaattgaagtagcatgtcctctgagttgcatgttttagataaaaaattgtttaattttagccttaattgtat |
| | acaaatttttgtcctgcatgaata |
| 231094_s_at | ggctgaggaggctggtctgaacatcactcacatttgcctccctccagatagcagtgaagccgagattatagatgaaatctta |
| SEQ ID | aagatcaatgaagataccagagtacatggccttgcccttcagatctctgagaacttgtttagcaacaaagtcctcaatgcct |
| NO: 229 | tgaaaccagaaaaagatgtggatggagtaacagacataaacctggggaagctggtgcgaggggatgcccatgaatgttttgt |
| | ttcacctgttgccaaagctgtaattgaacttcttgaaaaatcagtaggtgtcaacctagatggaaagaagattttggtagtg |
| | ggggcccatgggtctttggaagctgctctacaatgcctgttccagagaaaagggtccatgacaatgagcatccagtggaaaa |
| | cacgccagcttcaaagcaa |
| 231229_at | gcacgtccaaggtgatcctgagggctgtggcggacnaaggggacctgcaagtatntgtccctgnncaccctgaagaaggctg |
| SEQ ID | tttccaccacgggntacgacatggcccgaaatgcctatcacttcaagcgtgtgctcaaggggctggtggacaagggctcagc |
| NO: 230 | aggtgaccggcangggggcctcaggctccttcaccctgggcaagaagcaggcctccaagtccaagctcaaggtcaagaggca |
| | acgacagcagaggtggcgctctgggcagcgcccctttggacagcacaggtcactactgggctccaaacaggggcacaagcgg |
| | cttatcaagggggttcgaagggtggccaagtgccactgcaattaatgaggcaggccaggcaagcagtcaggggtgccaagan |
| | cgccattggctcagtgcagtgggaa |
| 231592_at | gtgtttttgttgcatctccaagtcagaataaatgccttttggagcagatatatttcatttagcatttagtatcatcttcatc |
| SEQ ID | aatactcgtatgaacgaaaaaataaaaagccctctcttattcccactctacaacgcatgtcaaaggtgatctgtttagtttt |
| NO: 231 | tccttagtatcgaacatatcacagctactcaatgaagtttcttctcaactaaagaaacacagtctcttagagaatttgttcc |
| | tgtgtttccaccataagataaatgagataaagaataaatttttactaaattggtaaatgcaaaagaatcttttttttattgc |
| | tcatatgtcttcctgtctctaagccagaccaatgagcaaatacctttaaaactagttgttacatcttgaaccatttaactgt |
| | aataaaagcagaatgtttagttaatgaattaaagaacaaaccctgagcccttttatcagtctcctggctttaaactaagcca |
| | atgaggaagtgatttgggggattcctgaaacta |
| 231715_s_at | caatgcagttgaggcctcctgtatccgaacacgagagctacagtccatggccgaccaagaaaagatctccccagctgccctt |
| SEQ ID | aagaagaccctcttagacagagtgaagctggaatcccccacagtctccacactgaccccctccagcccagggaagctcctca |
| NO: 232 | caagaagcctggccctgggaggcaagaaggactaaggcagcatctgtccccntctgtgattcagagccnttagttgagancc |
| | cctgccgcccctgccacccccctgccccgctcccaccattgcccctcctcagctgtgcaaggagaaagcatgcttaggaagt |
| | tttcaggtccttgtgataaaacctccttaaatctgttcagaccaagcaatgcgagc |
| 231890_at | cattgtgccattctagacttacctcctgccactccccaccagctttgttttgtcttagccacacaaaataatctagcgtctc |
| SEQ ID | taaccagtcaaacattttaccttgtgccttggctcactctgtgccttttctccagaatatctttctgtgtacttttctccca |
| NO: 233 | tccttttacctttaaacctgctgctatggtttgnatgttgtttggcccctccaaaactcangttgtagttcaattgccaatg |
| | taatagtgttgggagatggtacttttaagaggtaattaggttgctaagatggattaacatctttctcttgacactgagactg |
| | ggttctcctgggaatggttagttcccaagagagtgagttgttataaaacaatgctgcctcttctattttgcgctttttgttt |
| | gcacaaactcggtccccttctgtttctctacgatgttttgatgcagcatgaggcagtcatgagaacccaccagatacagctg |
| | cctgatcctgaatttcc |
| 231929_at | ggctcaaataccatacctcagaaaatgaggtttactatggaaatactgaaacagtctttgcagctgtgtgacaagtcactct |
| SEQ ID | actacatactgatttggagacctccgctaaatagttttatcactgcagactaaaatgtgggacttgtatcttctttgttttt |
| NO: 234 | aatgcacacacatacatgttctgtgcatgtatgtggttactgngtatatgtgtatgagtgttgtatatgcatgtgtgagtgt |
| | gtgtctgtatgtgtgtacaactaaagaagctgcagaaactttgtaatactttgtgaaaaggattatattataaaggtttgta |
| | ctgtctgagtgcacagctactggaataaatttagggaatctcaggaacaagcatanaannnntccaagatttatttcttctc |
| | agaagtgtaagtgcagtttttaattctgtat |
| 232114_at | gaactgcagtggaatcgtccaactatttattgccagttttggttctcctgaaccttatgccaccttaaggggaaaaaaaaat |
| SEQ ID | ccagtagctggcttgagattccagtgctcacacttgacatggtttccagagaatctggccccaaagtccagaaggctctggt |
| NO: 235 | tttcataaaaggtgtatttgctgtttattttgtatggtaagtatttgctcttttgaatttaattattactgtcagtgtcagt |
| | cttggttgtgtattgcatatactgtatttataaattggtgcaaaaagcacaagtaaattatacatcaaatttattataaaga |
| | aatagtaactattttaactttgttcaagtatgtggtaatttgctcctattagagtaaaaaagaaaccagtaaattatcagtt |
| | tgtgtaacttaagagnnnncnannnnnnnnttttttagatctagatgcataaaattttgaatgtgaaaattgcagggcattt |
| | taaaaccatatgtgggggatattttcccatgttctctgttatt |
| 232204_at | acagcctgcaagcgatatctggcatgattgttcctcctatgtgaaagaattgccttgaagaattgtattaatgaagaggttg |
| SEQ ID | gattctgctacagagagtaatctgatacaagtcccagagtggaacttttaactcaggcctttttaagaggaatcacaataac |
| NO: 236 | tgcagatttttaaacaaacaaaatcaccgaccttgcaaatactgaaattggaagagggatctgcaagtgcagggtgttggtt |
| | aaagttgtacctcccaagtatttgggggatatatttattctgtattgacaaaagcaaatccactttttctttttcttttttt |
| | tttttnaagcttaattctgcaatcatttgtcttttataaaccgtaaagctctatacaagggacactat |
| 232618_at | agaaggccgtgactttataacaaagaacaggagttgggtgagcccagtgcactgcacacaagagtcaagaagggagcttcct |
| SEQ ID | gagcaagaagtagcccctccgtctggtcagcaagctttacaatngcaacaggaacaaagaaaaagtcttaggaaaagaagtt |
| NO: 237 | ttattattgatgcaagccctaaacactctttcngactccagaggagaagctggcagctctctgtaagaaatatgctgatctt |
| | ggaaattcacctcttctatagaagagtttgttttgaactatacgatttgaaacaaaattctttttttggagactatggaaac |
| | attctcaacagggaaaccctactagactttgtaaagcaaataatggaaaagatacagaactttttgaagaatcatgggaaat |
| | ttttataattaaataaatgctaaaattctgttttgtgaaacatttatgggaattatcactgacagtttttgtacactttcaa |
| | atagtgttaaagcagcaactccatgttgtaaatgcacaa |
| 233976_at | tgagtcttttgaacacaggtatgaagtacaaagtgaatctaaaccaatgttacccctaccatacaggtatgttgtgttcaca |
| SEQ ID | aacacacacacacacacacacacaaattaaacatggtggaaatttttgacaaanttaaccacattaaatattctgtccatta |
| NO: 238 | agattccccaaagatggtgganngatngcagngttagtgngagaagatatttgcagcatgcaaggcaagatgacaatgcact |
| | aataacaaaatttcataaaacaatggacttggggcttgggaaaaataattatgacatgctttctgaagtgtccccagatagt |
| | ttcataaaaaatggagcaaataggctaaagaaaaacccatagacatcatgttcaaaagaactgatgacaaggcatgttcata |
| | acccataaaatacaagtggatgcagctaaataactgcaatacttttgaaagagtttggcaggtttcgaagatgtg |
| 235048_at | tcagtatttttattcgccttctagaacttgngatccacacatcacccatttatattagtggtaaaattatctgctaaaatct |
| SEQ ID | aattgtaagaaaggcttaccttctgtcatcaagtgattgtatcatcctggatcgtcatttccaaggaactagcctttctttt |
| NO: 239 | cctaagcgtctgtatgtgttctaaaacttccagtatatatttatagaacttagaaaaaatgttacattattcagagtagcaa |
| | gtcttactggagtacctatgtttgttttcttggtttttatttttttttaagtttaaaagtagtaattaaacctatattttgt |
| | gattgtttcctggtctgtgtttttaaattcntttccttcagttttcctcatgaagatgtttcagatactgaatttgtttaga |
| | cattgaatgactttgttaaaggcacaattaatcacattggttgtactctgaagac |
| 235092_at | cctttcaaacgtttaccagctaatgggcaagnctcaaggncaactgagaaaggggctgcgagtggtaatataaacaccaaag |
| SEQ ID | ttctctaanatacacaagacctgtaggctatgtgtcttctngtacttcaggtgtgtagtctatntctgacaggttgtgttag |
| NO: 240 | tgaattttaagaatggagaggagaatttagggtttgctttttctttgaaagcaaaaataaatgttcatattcttctgataca |
| | gtaaaaacccttgaaatgccctaatttagaatagcacctgattaattaagagttaaaagtctaagaaagtttattaaggcgt |
| | gcatggccttgggataacaatgaaaccatttgtctactggcatctgtctgctggtttcttgacaccagtgtaatatagaatt |
| | gtgacgtaaagaaccncaaaatataagagggtttcgtttcattggttttgttttgttctaaggaatgcagtctttcagtcat |
| | tatctttt |
| 235310_at | cgatccttggagatcccgtaatcccactacccttctttggctcagagaggataatttgcctaatgatacattaaagttagtg |
| SEQ ID | gcaaaacttaatttggagcctgatttcctactgacttccaatttagtgctcccccagtatgctaaatagaaagccctctgca |
| NO: 241 | atatattaaatgtatactaaatgtatatatttaataatgtcatgtataaaatatgaataaaatgtccacataggaaattaac |
| | acatatataccttctctgataagcactcctcnnatgtgtcctgattatttactttctcttatcttttccttagtgttcctca |
| | aattatatctatcctctaaaccagggatcagcaaactataacccccaggccaaatctagcccactccctgtttttatagata |
| | aagatttgttggaacacagccacactcatttgtttacctactatctatgattgttcaaccatgggagagttgagtaattgtg |
| | acatggaccataggccctaaaga |
| 235569_at | gcctctagggtgatggaccagccccnttaaagnacttgactcaactacaggggcctgggaagatgcctgggtcccctagggg |
| SEQ ID | ccttgccaaggggacctgtcgcaccccaccactccactgggctcgcacaacgccaaggccgccaggagtgttttacatcatg |
| NO: 242 | tcctgagcctacctttcccccaaattctggggcccacagcctaggagccaggtgatcaggcctcggctgtggggccagggac |
| | accatggccctggggctactacgtgtccacacatgctccagaccctggggcaaggtaggccaggggcttctgacctgtgcag |
| | gtgagagtgggccatacccaggaaagaccattctgtatttttctgtccctgtctccttagaatggaagctttttgagggcag |
| | gtccttgtctttgtacgttctg |
| 235885_at | aaatgtatatatatcctagtcccctaaccaaatcctgacctattgggatacttataaaaatttaagtaagtgggatacacaa |
| SEQ ID | agaataataactattaacttttcattattagcaaaaacctaagggatttaaactaattgaaactgtatttgattggacttaa |
| NO: 243 | ttttttatgtttatttagaagataaagatttaaagaagacctttacaataaagagaagaaatatcgaagtcattaaaataag |
| | gagacttacttttatgacattctaatactaaaaaatatagaaatatttccttaattctagagaaactagttttactaatttt |
| | ttacaacttcaataataccatcactgacacttacctttattaattagcttctagaaaatagctgctaattaggttaatgaac |
| | attttaccttagtgnaaaaaaattaattaaatatgattacaaagttgcacagcataactactgagaggaaagtgattgatct |
| | gtttgtaattacttgt |
| 236694_at | attagagctatatcattttactctgaatgtcttaacatagaagtttacataaaatttacagattggattgatttcagccttc |
| SEQ ID | ttctggtactttttaaaatcttattaatcattaggaaaagaagttttattattgatgcaagccctaaacactctttcgactc |
| NO: 244 | cagangagnaagctggcagctctctgtaagaaatatgctgatcttgtgagtatttatttaatggagcaaggaacacagaaaa |
| | taaaatctatgtgtgcttgataagatttttaaatattattttgatgtaactttaaatgtaaaatgatattttatctcaaaat |
| | tgaaaacaatctcctttctttagtacttatgattggtgtgtgtgacttcatcttatgaa |
| 236707_at | tccagggtctctactgttctcctggccttttctcatgctggctacttcaggatttgagtgtctactacacctgtaggtctca |
| SEQ ID | tattttcaacaaagtacaaagaaagatgtagggatgatattacccgtgtctgtccctttttatcaggaaaaccaatgtttct |
| NO: 245 | ccagaaactcccctatgagaccgggtnccatggccatccccagcagctgatcataattggcttaaacaaattaggatttatt |
| | gcttggggttctgttagcaaaagaaagggataattatctgtattaatagacagttaataatgtctnccatagggagtaccaa |
| | acaatgacaatgacagaaaccagttttcgagtatatgcactgtatcactccctccccaccactgtccactcactctccacta |
| | gacctcacatccaggtattagcttctatgcacagagacttacctcttacctattcaactttaat |
| 238106_at | gggacagacacttgtcattgccaagtaagtcacatttaaattccctcaagccttgagaaataatgtgagggaaagtgcaaaa |
| SEQ ID | atagcacagtcattcctttggactaagtcaactcctaggcctcctgagagcactgtagctgtgtgttcatctntatgcaaag |
| NO: 246 | agaaataaaaagaatcaactatatttgtcacagggtactttcctatataccagcgtacacctctatcaatacattttatgcn |
| | tgagactttcggtaaggaaagactgaccnatacacactgcctcatgcacagatatagacacatattgaagatactttctttc |
| | ccctgcaatgcagaaaattgcatgagcacacacaaccacactaaaccaaccagaatgaaactagaggcagctgtatctgatt |
| | gaaactggtgagaattgagattgacagagttacagggctaggaggttaatgagtccatactcctgcctccagtcagaactgt |
| | cctaagc |
| 238693_at | gccctgaaagctttatagtcctggacatcaaaaattttatttgagatgatgaatgttttgttttcatcttttcttatattac |
| SEQ ID | cacaattgagatattttagtaattgaaggaacatacacagatatttggcagaagtcgagtaaggaggggaaaaaaagagtcc |
| NO: 247 | gtgagtttcagtcattttcactgctcttttcaaaaagattgtgttgagctngtagaagactaaagatgtcactgaagacatc |
| | acagatactatatttatcttttggctttgtgtacattagagaatgttgattatttttatacaaaaatacagcgggtaatttt |
| | tttaatctttanangcctcttgtttgaatgtatgcttngtggaattctttgtgtagtaatgttttaaaaaaagatgtttact |
| | gatagttacatgtaggattagaatatgtaatataatataaggctcatgttccagacctacgatagcttgtagtctatgttac |
| | gtatttctttatatcac |
| 239146_at | tgatctccaaacccttattttttctttgaactgtnaaatttccactcatggacgatgcaaccaacagatgcaatctctgaga |
| SEQ ID | agatgaaaattgggacctcttattataaaattgacctagctggactcaggaaaccagggaagaagtcaatgcaggcatttaa |
| NO: 248 | aatgtaaagttttttctggttaaatctatttatttttcttgtaggttgagtatttcttcccagtttttctgctctggtgtat |
| | aacaaacaggtcaaaatttcccatctttcctcctgatagtagttgaatcctaccttgcatacttaatgcatagtgaaatggc |
| | atctagcagaaatacacacccccaaaacacaccaccatttcattaggtgcccaaaaaattctgtatttagcttatttattta |
| | ttgttatttttgctttttcttaacccactatata |
| 239486_at | taaagttgggcagtaatcttaattatgatggaattatcattatgctaagtaattaactttacctagtttgttttacaactag |
| SEQ ID | aacctgccctaaatgttgaatatcttcctagcaagaaacagtctgtcattttacttacacgatgtctaaccaaaccataact |
| NO: 249 | ttacataaactagtcgtttcggtcaaatagaaaaatgtgtgaatgccataaaaacaaaaattctcagttaaatgatactggg |
| | aaatagggaagacagcaaagtgagacttgggctcanggatgngttcaggaanaaaaaaaaagaaagacccctgagtaccatt |
| | aatattcctcagaaattattatttcaaaaggaaatatttctgtattataaatttttcatgagcagccattatgaaatctcac |
| | aa |
| 239499_at | gtgctggctgggaccggaagaactcctgcttggtggangcagagcccatgcagcttgtctgcctcatgcccacgatccactt |
| SEQ ID | ccggcctgcagagagccgcaagaagagcgccaagggcatgtactcctgcccctgctattactatcccaaccgggcaggcagc |
| NO: 250 | tcagaccgagcctcctttgtcatcggcattnanctgcggtctggggccatgacacctgatcattggatcaagaggggcactg |
| | ctctactcatgagcctggacagctgagacctcctcctnttctccgcttgagagagagggtcagggactccaggagctaagac |
| | agatgttgcacctaggactgaggccggacctcactcagactttgaccttggccgaatttgtgtgatgtggccctggagatac |
| | ctagtt |
| 239726_at | agagtcactacccgagttattcgccggcgtttgattataaaggtatcctgtagctggatcattatgtggcattgctctacta |
| SEQ ID | ttagaaactccttccttgtggttgtagaaactccttccttgtggttgtgaaatttcagcatgcttgataatgaaatggcttt |
| NO: 251 | gtgtaatttttttgcacccttgaaagcttgtaaaaacaacaaccaaaaagaaaagaagccatgttgcatggtattctgtata |
| | ggcctatttgatatgtggcggttgtagttttatttganaattcttggcatttgtatcctgctttccttgaagaagtgttatg |
| | tgaatgagcaaagattctgtcttggtgacacagtagttcatatcaaatgaaatgtttaattgaaaccttagaaactgtaaca |
| | aggtatgaggcacgataaagaagaaagagaatgaaagaattaaaaggcttccttctcagtctcaaattcctactgccttaag |
| | aatttttaaattaaaaccagttcttcataagcaatcagt |
| 239834_at | aataactgctaaggtcctattttgaatttgaagactaagagggagggatgttctttatttcttatagatggaatcaaatttt |
| SEQ ID | tataaacatgaaaggagtatagcgattgtaacaagacttcttgccatggttatttggagctattaagattaactgcctttta |
| NO: 252 | aagagtgggtatttttctgattttcaatattagtttgtggctacattcctttttctactgcaagaatgtttgctctccttta |
| | tgaaaagttcaagttggtggagaaactaaatgttntgtacataagtatataactttcttcattcaggaagtagttactgagc |
| | gcctactgttttggcttttgtaccaggagtctataaattaatcgttttccacctggcaagtagtctcattggcaaa |
| 240013_at | cttgcgatgcatcttactctgtttaatgaatagtagatgcatgtctgttttttgacggcatctaaaatatcataattattat |
| SEQ ID | cttgccatttgtgcattttacacaaatatttaataaaactgttattagccaggaagggcaattcccttttctgatattgcta |
| NO: 253 | gctgtgtttcttgggttgccactattgccactgaatgaaaaaaaccttttcttcacctaaccaggtaatctgcagttctcat |
| | aatcgctttgtgctattgatgagcagtcatatgtttttcaatgctatttataaagtacggtaaaatcgatgaggaatatgat |
| | gctttcgattgttatactaa |
| 241671_x_at | attctgaagccagaccgtctttcctcacagcnnnnnngnnncnnnnccgngggcacgcaagcttcccctggttacctgagct |
| SEQ ID | gctcctgccgtctcccgcntgggnttcgcngtggtgcacccgatcccggnatcgtgcgtntgcgccctgcgaaagaaggncc |
| NO: 254 | tgctggcggantccggncggggtctcctgnctcgcagctgggcgaggggacttggaggacagggtgaagctgcagaagacct |
| | ggggtgggatggntagagaggacgccaaggactggggaaggggaagttaggaataccttacatccaatgccca |
| 241956_at | ctgcaaagcagtattcctcagcctttggttgggtctttgatatgtggtgatatcctgggtttcaactcttctacaaggtttt |
| SEQ ID | cttatatataatgtaggatagatacagttgttctgtgatttgggatggttataaaattaaataaccaaatggaaaggcagaa |
| NO: 255 | agtgagaaatgttaagtgacattgtagtaccatataatattttagatcttgacttaggcatatacaaagagtatcttactta |
| | ttttatacaaagtctacaatgttatgatgctacaaagaatgagttaagaatgagtaaacgctaggttttatggagactcata |
| | agaaaatataaagattttcgtcttactattcaagtntgaaatgcataaatgaagctttataattggtgtgcaaaaccagaca |
| | tagaacctgcccttctggactctctggtcaagtgaag |
| 242469_at | ggatattgtaaacacacctcagggagataacatggggtggaggcagacaaacaggccaatccgggggaggaatggagttaag |
| SEQ ID | gaaagctctacaatgaggcagattttttaatacccactccttccaagtccttcagctcaagctgcagccaaatatttgcata |
| NO: 256 | aagagctggtaaaggattccagcttcctggttcatgacattacagcatggatcgttttcaaaattaatactgcctcctgttt |
| | cagcagtggctgcctgcacagctctccctgtggctcagagtatgggagtgagtatgccctgtaacccaaaagaggtgtggtg |
| | agctcngcttcccagcacagaatcacagagcaatacgggtacct |
| 242765_at | caagactacactttcttgccttctttctatttattctttttgtgcgtataaatggtatgttgtgatatattctcagtgcttg |
| SEQ ID | tgcccaccttggaactctgttcttgctcttcattccgcatgtgatactctggtccaagatcttggccaggtgccttctgctc |
| NO: 257 | aaatatcgtctcagaggtgcttcccttgaaaactcggtgctgtttccatagttactctatttgatcactctaagtttggttg |
| | tcttcatagcacttgtcaccctctggaactattctattcatttatttacttgtttaatgcttggctcttttcccctcctaac |
| | gtaaactccatgattgccaacacctgtt |
| 242874_at | gcagttccagtctcacagaagtctgctggagaatttcctctggcttggagaaggtggtcttttcattctactcaggtcttct |
| SEQ ID | attgattggataangtgncacatacatcatggagggcaatcttctttactcagaggacatcagtgtcaatgttattcccatc |
| NO: 258 | cagaaacaccttccaagttgacacataaaattaacaatacacttttcctcatctcacccaaatttaggttaagagttctgga |
| | tacctgaattaatattgccattggaatgccacttttacttttggagaaaaattagaaataacattttataaaattaaaaaac |
| | tgtaggctnggcacactggtttacacctataatc |
| 243010_at | gaaatacacccactctcttggaataatgacgtaccactcagttggaccctcaagagtcactgctttgtctgtgctggtagtt |
| SEQ ID | tgtgagaagtgacccgcacgcttccatttgatgcatttgatgtgagtgaatccatacatttgaatgtcattgtccttgagac |
| NO: 259 | cctacatgtgcagtttggctcatctcattaaagatgcttgatgtaataattggttagtttccttttattttcctgcaggctt |
| | ttccatgagtattatttttttcaaagaacaaatctgtatggcttttccccatctccatattttgttttgctatgaattgctt |
| | tgctttggtgaacttgtcctagtatgcttgcctcacaaacgttttagccattgtgaattttcttcatctctgtaaatagttc |
| | atctgtgcttctccctgatgacgttttattttttttcccctgtaagcaaccgaggtagaaaaataaattgtttaccatggan |
| | anannnnntgctgccgtctcttagcctgacagtgtcctgttctc |
| 243170_at | tcatataatatgttgctgcttttgggggggtgttggggagtaccagagaggtctgcatgcatctgcagtgtacactggcaaa |
| SEQ ID | caaaaggtttgtcattcccgttgtcctgttgtgcttcctttccacctctccctggctgttcccccacccccttgttcctttt |
| NO: 260 | gtaaaggatgcaggtgtagtcttgtgccagtctgtgacataacacctgaacaatttctatggtatcctacccatttgctcag |
| | attcaaaccaggccttaatcgataacaagca |
| 244008_at | tacatttcacatttaccagcaagtcagtaaaaaatagtgcttatttacatagtcaatataatttaatgttctaaaaataata |
| SEQ ID | tcttcgatctgcccaatatttaatgtatcatttgagatttttaaaaatgcanccgctccattatgtaaacattaagatatgc |
| NO: 261 | ctatgtttctttaactatacagcctctttacaataaatttcttgatttttgtgcacaggatagtattgcaacctgctattta |
| | gcctttggtgccttagaattattataaatatttaacaatatgtacataatgtaaatactgccaagagatcagtaaggccaaa |
| | tattttctctattcactttttattgctcttgctttctattgctactaaagcctcttttatccagctttgtaatagttccaac |
| | attgtagcgaa |
| 244272_s_at | tatcatcatatatttgtcctctagcatgtataacaccaagaggggactctaatgtaaaccatgaactttggatgataatgat |
| SEQ ID | gtttcagagtaggttcattgattgtaacaaatgtaccattggatggtaatttggaaagcaaataatcctcagtacagccaag |
| NO: 262 | ctgaggctttacagaaacagaagtcaatggaggtacagagatagtagcattttgactatttgggactgctgctttaaaatct |
| | ctttccacagaaaagttgtgtttttctgtttcaccatagaaacatcctccacagcaactctttataaattctgttgccatta |
| | cattcaatttccaatatccagcaaaagacacaaacttccaatcttaatattaatct |
| 244335_at | atgccagaattaccaaaagtcacgaaacacaaacagcaaataaagtgtaatgttacagctataacaactcacataaagtatg |
| SEQ ID | cagaaacaactaggaaacactgagaattttaaatctgattaaggagctagtagagattacccagcattcagctcaccatttg |
| NO: 263 | aaaccagccaaatgaatatgtgacaagtctcttttaaaaatcttgcactttgaaaaggaaatgtgttataagtgttactcaa |
| | tctggaagttgcaatgagcttgacaatgtcaaaacatggatttagagattctcaatgaacctctaatgttttaccttcaata |
| | aaatctcttttcataaaaggaaaaaaaagattacccaaattctaccatcattttgccactgggattattttcctttcaaaca |
| | atttggatgaccattattattcctggacttgaatgtacacgattctcataaacccaat |
| 244370_at | tgcccccctaggtgctaataaaaggatatttacttcaaagtttctggtttnagaannccncaatncaaagaaaaaaaataca |
| SEQ ID | cttttgttggaaattttgtancncaaancatgttgtgaaagagtgtagtgatcttgtgcaaaaaaaatgaacatttgtgagc |
| NO: 264 | ttcttgctgttttatagattttcttgtaaattattcttgtaacncttctggttttgttgttcttgttgcgaaggtttcaaat |
| | atttgtgactgaatgtacggtgaaactgtcataatgttacctagctgagttttgttat |
| 244393_x_at | cccagccgctataacttttaacaattcccatatgtcctttattccactaagatgagtgcagtatatatttccatctgtccaa |
| SEQ ID | ggcttcctaaatgtagccaangccaagccaacaccagtcacatgatcnaaatcaaagggcatttggggaatccaggctgtga |
| NO: 265 | ttcagggaagttccaagtgtctgatgaagtgtttgttttacatctttgtgtcccttgcaggtctagcactgtgctatgtagg |
| | taacatgtgctcc |
| 35685_at | gaggagcctgctttgcccagcctggagggcgtcagtgaaaagcagtacaccatctacatcgcacctggaggcggggcgttca |
| SEQ ID | cgacnnnnnnnnnnnnnnnnnnnnnnnnnnnnnnnnnnnnnnnattctggaaggtgtcccggccactggagctgtgctatgc |
| NO: 266 | tcccaccaaggatccaaagtgaccccaccaggggacagccagaggaaggggaccatggggtatccctgtgtcctggtctatc |
| | accccagcttctttgtcccccagtacccccagcccagccagccaataagaggacacaaatgaggacacgtggcttttataca |
| | aagtatctatatgagattcttctatattgtacagagtggggcaaaacacgcccccatctgctgccttttntattgccctgca |
| | acgtcccatctatacgaggtgtt |
| 39582_at | ggccacaaatggagggattgtcctttcaagcaccacagcttcagataaaattagtactttcaaatattgtccactttaactt |
| SEQ ID | aaaaaattctagagggattatattggagactcaactgcccttnggttttagtttataaaatggcctagtactgtggaatttt |
| NO: 267 | aattttagaaagtcttagcatcagatcataaacattcattaaaagaactcacatcccatctgaaacttcccaggggagttgg |
| | gattcttagtagattggtagaaaggggctcattttctactgcatttcccatttttggtatcttgttcagcatgttttatttt |
| | tatttcttgtctgcagaacatcctatatttatgagaacattctttaagaagaccaccacatagaataccccttcctatcagc |
| | tcgctctgatttagccttaat |
| 52164_at | aagatgccagccacggactcgtgccagcccagcacccaaggccagtacatggtggtcaccactgagcccctcacccaggccg |
| SEQ ID | tggtagacaaaactctccttctggtggtgctgttactcggggtgacccttttcatcacagtcttggttttgtttgccctgca |
| NO: 268 | ggcctatgagagctacaagaagaaggactacacccaggtggactacttaatcaacgggatgtatgcggactcagaaatgtga |
| | ggggggcgggggnctggcgggaggcctggccccttcctcgtcctttccttttgcctttgagaccaaaccaagtgcttccaaa |
| | ttcttttggtgcaattgaggagatatgccagatgcttaaacacatttaattgctgtcagattaattccatgatcactaaaga |
| | gttgctgcttttttcatannnannnntgtaaatgattctgtgcccaggagcag |

TABLE 11
100 PS gene list, target sequences

| | |
|---|---|
| Probe Set ID | Target sequence |

| | |
|---|---|
| 1555852_at | ccattctgagtacttctccgcaaaccctttgtttcattaaggactgttttacatgaagggtgcaaaagtaggataaaaatga |
| SEQ ID | gaaccctagggtgaaacacgtgacagaagaataaagactattgaatagtcctcttctctacccatggacnttggnattttta |
| NO: 269 | tattngattttaaggaaatataacttagtagtaaagagatgagcattcaagtcaggcagacctgaatttgggtcaaggctgc |
| | gccactcaaaagctatatgacctctatatgagcagcttattcaacctcttttaacctccattttgtcatctgtagaatgatg |
| | ataaatgcctagctcagaaggattcc |
| 1556049_at | aaactccagggctcattagtccttttataaacgccggtgtgaaatgatgggtatccgtgtgcctggtccaagtttcctggtg |
| SEQ ID | gttgacttgggcgaataaaaataagacatgttctgcagagttctccttttaaattcttgtgtaatattccgtttgttttgct |
| NO: 270 | cctttgcaattaactacaaacttctaagtcctagaaaagatttcaagtatttatagagtgagcaacgatcattttcctagtc |
| | aaatagtatggcaaaaatcactgttttaaaaagttgtggcattaaactataaatcctccctcccctcgcttcccacccccaa |
| | ttatgaaagaaaagcatatgacaatgcctactgggctcagcttttgggctaattgagtctgactgagccttcttagcaggtt |
| | cctgtcttttgaaacctcaaatcccaaaaagctgtctaataattttacttttttagggactaagaccaggtattttcagcag |
| | aggttcttacttttctgtaattgaggcgcaac |
| 1561042_at | aaatgcagataaaggctacctctgaattctcaatagattcatcatgtttgctcttaagtgtagctgtccacactg |
| SEQ ID | |
| NO: 271 | |
| 1563497_at | taccatagcaagttcttatcctttgttaatatattataaatacgacttttttcctttacctgtcacagtaatatgccaattt |
| SEQ ID | ttggtgtcgctttagtaatttttttgggggggactgtcaaatttcagtaaactttataggctatagtttacaatttaaggtc |
| NO: 272 | tttcctcagttgtctcctaaaaaattttgtggaaatcgaaatttcttttcaattgatcgtcttgtgcagccctttaaaaaat |
| | gcgttttgcattcatgtctttgcagtacaaatctgtatctttcattttgggagtgactgtcatagatgggtaatataaagtg |
| | acaacacacacaccagggccagattgcgtgggttctagctagggacctagagctggttacttgatttctctctgttccattt |
| | actatctg |
| 200615_s_at | gggcaggacatgctgtaccaatccctgaagctcactaatggcatttggattttggccgaactacgtatccagccaggaaacc |
| SEQ ID | ccaattacacgctgtcactgaagtgtagagctcctgaagtctctcaatacatctatcaggtctacgacagcattttgaaaaa |
| NO: 273 | ctaacaagactggtccagtacccttcaaccatgctgtgatcggtgcaagtcaagaactcttaactggaagaaattgtattgc |
| | tgcgtagaatctgaacacactgaggccacctagcaaggtagtaactagtctaacctgtgctaacattagggcacaacctgtt |
| | ggatagttttagcttcctgtgaacatttgtaaccactgcttcagtcacctcccacctcttgccacctgctgctgctatctgt |
| | ccttacttgtgggcttctccatgctgtgccaatggctggctttttctacacc |
| 200904_at | tgtgccttcattcatgggttaatggattaatgggttatcacaggaatgggactggtggctttataagaagaggaaaagagaa |
| SEQ ID | ctgagctagcatgcccagcccacagagagcctccactagagtgatgctaagtggaaatgtgaggtgcagctgccacagaggg |
| NO: 274 | cccccaccangggaaatgtctagtgtctagtggatccaggccacaggagagagtgccttgtggagcgctgggagcaggacct |
| | gaccaccaccaggaccccagaactgtggagtcagtggcagcatgcagcgcccccttgggaaagctttaggcaccagcctgca |
| | acccattcgagcagccacgtaggctgcacccagcaaagccacaggcacggggctacctgangccttgggggcccaatccctg |
| | ctccagtgtgtccgtgaggcagcacacgaagtcaaaagagattattctcttcccacagataccttttctctcccatgaccct |
| | ttaacagcatctgcttcattcccctcaccttcccaggctgatctgaggtaaa |
| 200905_x_at | aaagcctgagacagctgccttgtgtgcgactgagatgcacagctgccttgtgtgcgactgagatgcaggatttcctcacgcc |
| SEQ ID | tcccctatgtgtcttaggggactctggcttctctttttgcaagggcctctgaatctgtctgtgtccctgttagcacaatgtg |
| NO: 275 | aggaggtagagaaacagtccacctctgtgtctaccatgacccccttcctcacactgacctgtgttccttccctgttctcttt |
| | tctattaaaaataagaacctgggcagagtgcggcagctcatgcctgtaatcccagcacttagggaggccgaggagggcagat |
| | cacgaggtcaggagatcgaaaccatcctggctaacacggtgaaaccccgtctctactaaaaaatacaaaaaattagctgggc |
| | gcagaggcacgggcctgtagtcccagctactcaggaggcggaggcatggagaatggcgtcaacccgggaggcggaggttgca |
| | gtgagccaggattgtgcgactgcactccagcctgggtgacagggtgaaacgccatctc |
| 201009_s_at | atactgaggtggatccctgcatcctcaacaacaatgtgcagtgagcatgtggaagaaaagaagcagctttacctacttgttt |
| SEQ ID | ctttttgtctctcttcctggacactcactttttcagagactcaacagtctctgcaatggagtgtgggtccaccttagcctct |
| NO: 276 | gacttcctaatgtaggaggtggtcagcaggcaatctcctgggccttaaaggatgcggactcatcctcagccagcgcccatgt |
| | tgtgatacaggggtgtttgttggatgggtttaaaaataactagaaaaactcaggcccatccattttctcagatctccttgaa |
| | aattgaggccttttcgatagtttcgggtcaggtaaaaatggcctcctggcgtaagctttt |
| 201010_s_at | gtgttctcctactgcaaatattttcatatgggaggatggttttctcttcatgtaagtccttggaattgattctaaggtgatg |
| SEQ ID | ttcttagcactttaattcctgtcaaattttttgttctccccttctgccatcttaaatgtaagctgaaactggtctactgtgt |
| NO: 277 | ctctagggttaagccaaaagacaaaaaaaattttactacttttgagattgccccaatgtacagaattatataattctaacgc |
| | ttaaatcatgtgaaagggttgctgctgtcagccttgcccactgtgacttcaaacccaaggaggaactcttgatcaagatgcc |
| | caaccctgtgatcagaacctccaaatactgccatgagaaactagagggcaggtgttcataaaagccctttgaacccccttcc |
| | tgccctgtgttaggagatagggatattggcccctcactgcagctgccagcacttggtcagtcactctcagccatagcacttt |
| | gttcactgtcctgtgtcagagcactgagctccacccttttctgagagttat |
| 202544_at | gtattcttactatggttgcctttccctatttgttcaatagactgataatactggtatttatagagtttgagccattacaact |
| SEQ ID | tttgtgaggatgtgtttcaaacatttctggacaaatcttattttgtatttctggaagaatgtagtaatcttctagaccgctt |
| NO: 278 | aaaaccaatgctcccaagctgaatattcttgagcaaatttgttttttattatgccatttgacatttcaaatcagtgctcata |
| | tacagtaaacttgtgatagaaattgtattttattgctttttggattataattcatataaatataattacttgaatattgttt |
| | gagatcattaacatgccagggcagttcccactgatttagatggtccaagataatctcattcaggaggcttgaaacattaatg |
| | gtttagtcttgtgaattttaacagttctctgtcatcgtttaacaaaaccaacaactgacacaactccttaagctgtggtttc |
| | agtctctgctagttcatattgcatgt |
| 202546_at | gatctggtgcggaacctgcaaagtgaggtggagggagttaagaatattatgacccagaatgtggagcggatcctggcccggg |
| SEQ ID | gggaaaacttggaacatctccgcaacaagacagaggatctggaagccacatctgagcacttcaagacgacatcgcagaaggt |
| NO: 279 | ggctcgaaaattctggtggaagaacgtgaagatgattgtccttatctgcgtgattgtttttatcatcatcctcttcattgtg |
| | ctctttgccactggtgccttctcttaaagtaa |
| 202828_s_at | gggggccacagggtgggctgtggagctctcaggaagggccctgaggaaggcacacttgctcctgttggtccctgtccttgct |
| SEQ ID | gcccaggcagcgtggaggggaagggtagggcagccagagaaaggagcagagaaggcacacaaacgaggaatgaggggcttca |
| NO: 280 | cgagaggccacagggcctggctggccacgctgtcccggcctgctcaccatctcagtgaggggcaggagctggggctcgctta |
| | ggctgggtccacgcttccctggtgccagcacccctcaagcctgtctcaccagtggcctgccctctcgctcccccacccagcc |
| | cacccattgaagtctccttgggccaccaaaggtggtggccatggtaccggggacttgggagagtgagacccagtggagggag |
| | caagaggagagggatgtcgggggggtggggcacggggtaggggaaatggggtgaacggtgctggcagttcggctagatttct |
| 204078_at | aacttaagatggacacagctgactggacccccatcctgcctcacccatgggtgctgcaccccagacccatcctgccacttct |
| SEQ ID | atgtctctggaccacaggatggtggtggcattgcaggttggcaagtgggctgatggggtccgccctcctcactgctgagctc |
| NO: 281 | ctcacctggacagtctcctggacaaggagtttccagctgctggctggagtctcaggccaaattgcagagggtcctccagggt |
| | cctgaagagcactggactaagagtctagtggttccagggc |
| 204116_at | ttctggctggaacggacgatgccccgaattcccaccctgaagaacctagaggatcttgttactgaataccacgggaactttt |
| SEQ ID | cggcctggagtggtgtgtctaagggactggctgagagtctgcagccagactacagtgaacgactctgcctcgtcagtgagat |
| NO: 282 | tcccccaaaaggaggggcccttggggaggggcctggggcctccccatgcaaccagcatagcccctactgggcccccccatgt |
| | tacaccctaaagcctgaaacctgaaccccaatcctctgacagaagaaccccagggtcctgtagccctaagtggtactaactt |
| | tccttcattcaacccacctgcgtctcatactcacctcaccccactgtggctgatttggaattttgtgcccccatgtaagcac |
| | c |
| 204233_s_at | gcaaacatccggaagtatcccaccaagaaacaacagctccattttatttccagttacttgcctgcattccaaaatgactttg |
| SEQ ID | aaaacctcagtactgaagaaaaatccattataaaagaagaaatgttgcttgaagttaataggtttgcccttgcatctcattt |
| NO: 283 | cctctggggactgtggtccattgtacaagccaagatttcatctattgaatttgggtacatggactacgcccaagcaaggttt |
| | gatgcctatttccaccagaagaggaagcttggggtgtgactgtggggaggactccatccacctcatcactggactgcatggg |
| | gaggcagcagagcggggtcccctctgtgcttcgactactgctcctgtggcaggaggctttgggtggctcactactgaacaca |
| 204266_s_at | tgtagatggcgactgtgttatagacggtgctcactcccaagggacagcaagtgagcagagatgtactgcaaagtcgccagtc |
| SEQ ID | actgcgtgcaaggtggcctctgcctggggccgtccagaagctgctcctttaccctcttggtcccatggctgaagcggagcag |
| NO: 284 | ctggattgctctggagcagccaaggccgccactgtggagacagagctctcccctcctgctgggcgtgtgtgacactgtagag |
| | tttcactgtactcgatgtgacttctcccctgcccttcctcctgatggagtgtgcagacagccatgcgtggccacgggggcag |
| | tgtgaggacctccctgtctcccgctcccctcccagggagcagctgcttgacctagctctttgggcctctcctgccctctgct |
| | ctgcctggagtgtcggatcctgtgagtaggctgggcctcccctgggcagggttctccaaggccggtttcccggcccttacca |
| | aacctgatgcccctgacatcatcattcttgtgggagacagcagcctgtatgtggtgtggggcgtggatcgagtgtagc |
| 204410_at | cctttcctactgtgataacgtcaagtaattggatattttgaatacatttctgcctgataatcatgctgagttctaataagcc |
| SEQ ID | ctacttccacctaatctgtttacagtcttttggtatgtttcagttacttagatggtctcataaggtttctgatacaatttga |
| NO: 285 | agacagaaatctgcatttagaatcagaaaacatggacatatttttcatatttatctagtcatatgtaattttatgctaacat |
| | tgatagtttataaatccttttcatcctttgtgcctcggttattaaggaaaaaaaaatgtccaacatacagtttttaaagtgt |
| | ggcagttttgagtagtaacttagaatgtataagattaagagttaaagaaaccgaacaataagtggcaaccaattatcttaac |
| | attggaaatactggggtgccattttgttttcaaaagttattcattgtaatccactgttttggctttca |
| 204806_x_at | cagatcctccaaaggcacacgttgcccaccaccccatctctgaccatgaggccaccctgaggtgctgggccctgggcttcta |
| SEQ ID | ccctgcggagatcacgctgacctggcagcgggatggggaggaacagacccaggacacagagcttgtggagaccaggcctgca |
| NO: 286 | ggggatggaaccttccagaagtgggccgctgtggtggtgccttctggagaggaacagagatacacatgccatgtgcagcacg |
| | aggggctgccccagcccctcatcctgagatgggagcagtctccccagcccaccatccccatcgtgggcatcgttgctggcct |
| | tgttgtccttggagctgtggtcactggagctgtggtcgctgctgtgatgtggaggaagaagagctcagatagaaacagaggg |
| | agctactctcaggctgcagtcactgacagtgcccagggctctggggtgtctctcacagctaataaagtgtgagacagcttcc |
| | ttgtgtgggac |
| 204897_at | agcagcttattgtttctctgaaagtgtgtgtagttttactttcctaaggaattaccaagaatatcctttaaaatttaaaagg |
| SEQ ID | atggcaagttgcatcagaaagctttattttgagatgtaaaaagattcccaaacgtggttacattagccattcatgtatgtca |
| NO: 287 | gaagtgcagaattggggcacttaatggtcaccttgtaacagttttgtgtaactcccagtgatgctgtacacatatttgaagg |
| | gtctttctcaaagaaatattaagcatgttttgttgctcagtgtttttgtgaattgcttggttgtaattaaattctgagcctg |
| | atattgatatg |
| 205027_s_at | attatataactctttgagcctttattggtaaattctggtatacattgaattcattataatttgggtgactagaacaacttga |
| SEQ ID | agattgtagcaataagctggactagtgtcctaaaaatggctaactgatgaattagaagccatctgacagacggccactagtg |
| NO: 288 | acagtttcttttgtgttcctatggaaacattttatactgtacatgctatgctgaagacattcaaaacgtgatgttttgaatg |
| | tggataaaactgtgtaaaccacataattttgtacatccaaggatgaggtgtgacctttaagaaaaatgaaaacttttgtaaa |
| | ttattgatgattttgtaattcttatgactaaattttcttttaagcatttgtatattaaaatagcatactgtgtatgttttat |
| | atcaaatgccttcatgaatctttcatacatatatatatttgtaacatgtaaagtatgtgagtagtcttatgtaaagtatgtt |
| | tttacattatgcaaataaaacccaatacttttgtccaatgtggttggtcaa |
| 205204_at | agatccgagtgcactcgcgaggcaacctctgggccaccggtcacttcatgggcaagaagagtctggagccttccagcccatc |
| SEQ ID | ccattggggacagctccccacacctcccctgagggaccagcgactgcagctgagtcatgatctgctcggaatcctcctgcta |
| NO: 289 | aagaaggctctgggcgtgagcctcagccgccccgcaccccaaatccagtacaggaggctgctggtacaaatactgcagaaat |
| | gacaccaataataggggcagacacaacagcgtggcttagattgtgcccacccagggaaggtgctgaatgggaccctgttgat |
| | ggccccatctggatgtaaatcctgagctcaaatctctgttactccattactgtga |
| 205273_s_at | ggctgtcgactgggctaagtctggaaaattcacacagcaagacatcgacgaagccaaactttctgtcttctcaaccgtagat |
| SEQ ID | gctcctgtcgctccttcagacaaaggaatggaccacttcttgtacggcctctcggatgagatgaagcaggcccacagagagc |
| NO: 290 | agctctttgctgtcagccacgacaagctcctggccgtgagcgatagatacctcggcactgggaagagcacacacggcctggc |
| | catcctcggacccgagaacccgaaaattgccaaggacccatcctggatcatccgatgagcagccgtggcgctcgactgcaca |
| | ggagcccgagacaatacacctccgagctgaatatgaaaagtcagaaatgctactgctttttccaagaatattatgtcattga |
| | gtgtcgccaaagcccttgactggcgagtcaaaaactcagatctatcttaagagtgaccaggaagaggttcattgaaataatc |
| | atgcatgaagcgccaaagatgcaccatgtagaattttcactttgtactggcaggctcg |
| 205419_at | cagcccctgaagaaaattcacgtgaaatgacagaaacgcagatgatgatacattccaagtcttcaaatggaaagtgaaatgg |
| SEQ ID | attgtattttggtttatagtgacgtaaactgtatgacaaactttgcaggacttcccttataaagcaaaataattgttcagct |
| NO: 291 | tccaattagtattcttttatatttctttcattgggcgctttcccatctccaactcggaagtaagcccaagagaacaacataa |
| | agcaaacaacataaagcacaataaaaatgcaaataaatattttcatttttatttgtaaacgaatacaccaaaaggaggcgct |
| | cttaataactcccaatgtaaaaagttttgttttaataaaaaattaattattattcttgccaacaaatggctagaaaggactg |
| | aatagattatatattgccagatgttaatactgtaacatactttttaaataacatatttcttaaatccaaatttctctcaatg |
| | ttagatttaattccctcaataacaccaa |
| 205696_s_at | ttcctgttctcttgtatagctgaaattccagtttaggagctcagttgagaaacagttccattcaactggaacattttttttt |
| SEQ ID | ttccttttaagaaagcttcttgtgatccttcggggcttctgtgaaaaacctgatgcagtgctccatccaaactcagaaggct |
| NO: 292 | ttgggatatgctgtattttaaagggacagtttgtaacttgggctgtaaagcaaactggggctgtgttttcgatgatgatgat |
| | catcatgatcatgatgattttaacagttttacttctggcctttcctagctagagaaggagttaatatttctaaggtaactcc |
| | catatctcctttaatgacattgatttctaatgatataaatttcagcctacattgatgccaagcttttttgccacaaagaaga |
| | ttcttaccaagagtgggctttgtggaaacagctggtact |
| 205890_s_at | gatcttaaagccacggagaagcctctcatcttatggcattgacaaagagaagaccatccaccttaccctgaaagtggtgaag |
| SEQ ID | cccagtgatgaggagctgcccttgtttcttgtggagtcaggtgatgaggcaaagaggcacctcctccaggtgcgaaggtcca |
| NO: 293 | gctcagtggcacaagtgaaagcaatgatcgagactaagacgggtataatccctgagacccagattgtgacttgcaatggaaa |
| | gagactggaagatgggaagatgatggcagattacggcatcagaaagggcaacttactcttcctggcatcttattgtattgga |
| | gggtgaccaccctggggatggggtgttggcaggggtcaaaaagcttatttcttttaatctcttactcaacgaacacatcttc |
| | tgatgatttcccaaaattaatgagaatgagatgagtagagtaagatttgggtgggatgggtaggatgaagtatattgcccaa |
| | ctctatgtttctttga |
| 206035_at | aatggattgattcctgcctttattcttgtaataatagcttcttttacttcttttttcttcacacatcgaatacccaaatttt |
| SEQ ID | ggaaaaacaaaggtctgcgttcttgtccaaattctgcttcatagtagccgtctctgcagtcttttccaactaaatcatgagg |
| NO: 294 | atgaggtttatatgggtcattctttgttactaatgtaattctcacttttccttttccataatagttcataatctggatagaa |
| | gggtatgttcggttgttgtctgtgctgtgctcccctggaatgctgcctgctgatcgcccttcacatttgtatctaaaacgca |
| | ttcccctctgcctgggttgttcaattatctctatatacgggttatacgcaccggaggc |
| 207397_s_at | gatgtggctctaaatcagccggacatgtgcgtctaccgaagagggaggaagaagagagtgccttacaccaaactgcagctta |
| SEQ ID | aagaactggagaacgagtatgccattaacaaattcattaacaaggacaagcggcggcgtatctcggctgctacgaacctatc |
| NO: 295 | tgagagacaagtgaccatttggtttcagaaccgaagagtgaaggacaagaaaattgtctccaagctcaaagatactgtct |
| 207651_at | ttgccttgtaattcgacagctctacagaaacaaagataatgaaaattacccaaatgtgaaaaaggctctcatcaacatactt |
| SEQ ID | ttagtgaccacgggctacatcatatgctttgttccttaccacattgtccgaatcccgtataccctcagccagacagaagtca |
| NO: 296 | taactgattgctcaaccaggatttcactcttcaaagccaaagaggctacactgctcctggctgtgtcgaacctgtgctttga |
| | tcctatcctgtactatcacctctcaaaagcattccgctcaaaggtcactgagacttttgcctcacctaaagagaccaaggct |
| | cagaaagaaaaattaagatgtgaaaataatgcataaaagacaggattttttgtgctaccaattctggccttactgga |
| 208296_x_at | ttgagttctccttttaagtaccaatgatacttaaatttctcagaaatgtaatggtgtgtcattgccttgaaatgcttgctta |
| SEQ ID | gggcttcttttatgttatcttaaaaagtgctggtgaattttccattttttacatccatttcacatgtaagagacacaaaagt |
| NO: 297 | ctagattggtcttgatattgagataataaaaagtaagtagcattaagaaaggtaacaatcttcattctacagatgaactcat |
| | tgaaacaatttaggggaatgaggggcaaaaggggagaaatactgctaaagaacatgagcataaaaatgcgtgcgtttcagtg |
| | tttaagaaggcttgataaagaatgtcacttttttatttaactgataagatttttgttattttttactttgataagtaaacca |
| | aagaatatttgtatttcaagcagtttgtgtggtgtttctatataattttctgtgtataaataataaagtaggcatttgttta |
| | ttttgtaaaaaagaaatgaaaatctgctggccagctatgtcctctaggaaatgacagacccaaccacca |
| 208478_s_at | agggtttcatccaggatcgagcagggcgaatggggggggaggcacccgagctggccctggacccggtgcctcaggatgcgtc |
| SEQ ID | caccaagaagctgagcgagtgtctcaagcgcatcggggacgaactggacagtaacatggagctgcagaggatg |
| NO: 298 | |
| 208799_at | ctggcctctactacgtggacagtgaagggaaccggatttcaggggccaccttctctgtaggttctggctctgtgtatgcata |
| SEQ ID | tggggtcatggatcggggctattcctatgacctggaagtggagcaggcctatgatctggcccgtcgagccatctaccaagcc |
| NO: 299 | acctacagagatgcctactcaggaggtgcagtcaacctctaccacgtgcgggaggatggctggatccgagtctccagtgaca |
| | atgtggctgatctacatgagaagtatagtggctctaccccctgaaagagggtggatgcagctgcttgtgtttcttggggtga |
| | ctgtcattggtaatacggacacagtgacccatcctccatcctatttatagtggaagggccttcaattgtatcagtacttttt |
| | tttaagctctggcacattgacctctat |
| 208885_at | gaagtaagcctcatcatcagagcctttcctcaaaactggagtcccaaatgtcatcaggttttgttttttttcagccactaag |
| SEQ ID | aacccctctgcttttaactctagaatttgggcttggaccagatctaacatcttgaatactctgccctctagagccttcagcc |
| NO: 300 | ttaatggaaggttggatccaaggaggtgtaatggaatcggaatcaagccactcggcaggcatggagctataactaagcatcc |
| | ttagggttctgcctctccaggcattagccctcacattagatctagttactgtggtatggctaatacctgtcaacatttggag |
| | gcaatcctaccttgcttttgcttctagagcttagcatatctgattgttgtcaggccatattatcaatgtttacttttttggt |
| | actataaaagctttctgccacccctaaactccaggggggacaatatgtgccaatcaatagcacccctactcacatacacaca |
| | cacctagccagctgtcaagggc |
| 209140_x_at | gacctggcagcgggatggcgaggaccaaactcaggacaccgagcttgtggagaccagaccagcaggagacagaaccttccag |
| SEQ ID | aagtgggcagctgtggtggtgccttctggagaagagcagagatacacatgccatgtacagcatgaggggctgccgaagcccc |
| NO: 301 | tcaccctgagatgggagccatcttcccagtccaccgtccccatcgtgggcattgttgctggcctggctgtcctagcagttgt |
| | ggtcatcggagctgtggtcgctgctgtgatgtgtaggaggaagagttcaggtggaaaaggagggagctactctcaggctgcg |
| | tccagcgacagtgcccagggctctgatgtgtctctcacagcttgaaaagcctgagacagctgtcttgtgagggactgagatg |
| | caggatttcttcacgcctcccctttgtgacttcaagagcctctggcatctctttctgcaaaggcacctgaatgtgtctgcgt |
| | ccctgttagcataatgt |
| 209567_at | ccgcctggcttgggtggcaagagaaaaggaggacagcgcccaggaggaaagaggaggaagtaatagtttctaactgtcggac |
| SEQ ID | ccgtctgtaaaccaaggactatgaatactaaatgttaagttctaggcaattatacggggactcagaaggacctggccgctgc |
| NO: 302 | cttcattgagtttaaagggacaggattgcccttccgtcaagaaagtatgtaagtgttggactgcacaaattaatgtttttcc |
| | cacaaccgagactttggagattaagaacttatttgaggatttaagaattagggaaataatttggtggaaaccgggaatgagt |
| | tctattcttaaacagcctttttttttctttttaatgttggatatacggcgaggtagagttggccatatttcagagacttaga |
| | ttgacgtatatgtttctgcattatttttacaacaagtttgtgtatcagagcgggagtgcgggggag |
| 209606_at | gaattgcaaaactgacatcccatttcacagcaatagtgacctttatttaaattgttgtgttatagtttatgcttcttaaatc |
| SEQ ID | atttttcaacctaaacagccaatttctaagcagacaggaaaactaaataataagttaattaatataacaaagatgcaggttc |
| NO: 303 | ctgctcattccagtaatgtctttgaaagcaaaactaatatttattttctagattatccctgtgaataattgagaactttttg |
| | gagtcaagtatgaataaaggtgtggcagaatataataatctggactattttctataggataattgctgggttataaaatctt |
| | aggtttgcttatgcccagtagctcctgcggaggcttaataataggcaattttgaatttgttcaaacctgtaatggcttgtaa |
| | acaaagatgaccatcagctgtttctcacatctatagtgacaataaagcgggaagtataagatttaataggaggggttaaggt |
| | tcatgagaaccatggaaagatgtggtctgagatgggtgctgcaaagat |
| 209774_x_at | agagagacacagctgcagaggccacctggattgcgcctaatgtgtttgagcatcacttaggagaagtcttctatttatttat |
| SEQ ID | ttatttatttatttatttgtttgttttagaagattctatgttaatattttatgtgtaaaataaggttatgattgaatctact |
| NO: 304 | tgcacactctcccattatatttattgtttattttaggtcaaacccaagttagttcaatcctgattcatatttaatttgaaga |
| | tagaaggtttgcagatattctctagtcatttgttaatatttcttcgtgatgacatatcacatgtcagccactgtgatagagg |
| | ctgaggaatccaagaaaatggccagtaagatcaatgtgacggcagggaaatgtatgtgtgtctattttgtaactgtaaagat |
| | gaatgtcagttgttatttattgaaatgatttcacagtgtgtggtcaacatttctcatgttgaagctttaagaactaaaatgt |
| | tctaaatatcccttggacattttatgtctttcttgtaagatactgccttgtttaatgttaattatgcagtgtttccctc |
| 209849_s_at | tactggcacaagtttatcttcttccagatttcctttcagaacactcaaaggttcgactagtgatagtggatggtattgcttt |
| SEQ ID | tccatttcgtcatgacctagatgacctgtctcttcgtactcggttattaaatggcctagcccagcaaatgatcagccttgca |
| NO: 305 | aataatcacagattagctgtaattttaaccaatcagatgacaacaaagattgatagaaatcaggccttgcttgttcctgcat |
| | taggggaaagttggggacatgctgctacaatacggctaatctttcattgggaccgaaagcaaaggttggcaacattgtacaa |
| | gtcacccagccagaaggaatgcacagtactgtttcaaatcaaacctcagggatttagagatactgttgttacttctgcatgt |
| | tcattgcaaacagaaggttccttgagcacccggaaacggtcacgagac |
| 209894_at | ggcataggaacagttttctcttcatatattatgattatgaataataggaaagttgtattaattcagtatttgtcattatgca |
| SEQ ID | gtattttaatacctacataagtctattccattattatattttgcgcttggcatatttattcctttatgcttttaatcactaa |
| NO: 306 | catattttacttaagagtataaaactatgctaaataaattgtattgtatatggaatatgcttgccattatgaagaacagctg |
| | ggtataccattatttcaagtaataaatctgaattctattagtttaaaaattgtaaaattcaagttaaatgacgtgtatgata |
| | tataagctgaacacattttctatagcccttaatttagttgtgttaatttttcaaggtgatgtatcaacagcttttttttttt |
| | gcatttgttttttcaatgtgtttacattgtatgaattgagctttttgcccacagattcttgatttgtagttgtttggcagga |
| 210260_s_at | gattgagtcatcgacattcaggatttaagtctgaggtagtcaaccctcaggaaaaaaaaaatggcttatctgaaatcagtac |
| SEQ ID | tgtggaaatgaactatattagctattatgaataatgtccagtataagaatatgcttctggaattgagttctccttttaagta |
| NO: 307 | ccaatgatacttaaatttctcagaaatgtaatggtgtgtcattgccttgaaatgcttgcttagggcttcttttatgttatct |
| | taaaaagtgctggtgaattttccattttttacatccatttcacatgtaagagacaaaaaagtctagattggtcttgatattg |
| | agataataaaaagtaagtagcattaagaaaggtaacaatcttcattctacagatgaactcattgaaacaatttaggggaatg |
| | aggggcaaaaggggagaaatactgctaaagaacatgagcataaaaacgcgtgcgtttcagtgtttaagaagg |
| 210538_s_at | gaaagtgtcctatttgtaggagtacaatcaagggtacagttcgtacatttctttcatgaagaagaaccaaaacatcatctaa |
| SEQ ID | actttagaattaatttattaaatgtattataactttaacttttatcctaatttggtttccttaaaatttttatttatttaca |
| NO: 308 | actcaaaaaacattgttttgtgtaacatatttatatatgtatctaaaccatatgaacatatattttttagaaactaagagaa |
| | tgataggcttttgttcttatgaacgaaaaagaggtagcactacaaacacaatattcaatcaaaatttcagcattattgaaat |
| | tgtaagtgaagtaaaacttaagatatttgagttaacctttaagaattttaaatattttggcattgtactaatacctggtttt |
| | ttttttgttttgtttttttgtacagacagggcagcatactgagaccctgcctttaaaaacaaacagaacaaaaacaaaacac |
| | cagggacacatttctctgtcttttttgatcagtgtcctatacatcgaaggtgtgcata |
| 211529_x_at | caccaccctgtctttgactatgaggccaccctgaggtgctgggccctgggcttctaccctgcggagatcatactgacctggc |
| SEQ ID | agcgggatggggaggaccagacccaggacgtggagctcgtggagaccaggcctgcaggggatggaaccttccagaagtgggc |
| NO: 309 | agctgtggtggtgccttctggagaggagcagagatacacgtgccatgtgcagcatgaggggctgccggagcccctcatgctg |
| | agatggaagcagtcttccctgcccaccatccccatcatgggtatcgttgctggcctggttgtccttgcagctgtagtcactg |
| | gagctgcggtcgctgctgtgctgtggagaaagaagagctcagattgaaaaggagggagctactctcaggctgcaagcagtga |
| | cagtgcccagggctctaatgtgtctctcacggcttgtaaattgtgaaacagctgccctgtgtgggactgagt |
| 211595_s_at | acacagatccaggtagtctctgctagtaatgagccccttgcctttgcttcctgtggcacagagggatttcggaatgccaaga |
| SEQ ID | agggcacaggcatcgcagcacagacagcaggcatagccgcagcggcgagagctaaacaaaagggcgtgatccacatccgagt |
| NO: 310 | tgtggtgaaaggcctggggccaggacgcttgtctgccatgcacggactgatcatgggcggcctggaagtgatctcaatcaca |
| | gacaacaccccaatcccacacaacggctgccgccccaggaaggctcggaagctgtgatgggaaggaggcctgcacttggacc |
| | tgacctcaagcctcagctccagtgggaccttgtaaaatgctccctgtcagagctctccagaatatgcttgttggagatcctt |
| | caggcagtaagggagagttttgcctccttacacagtggcctttgcttgcacctccagctggagatgggtgtgccccagaagt |
| | aagctttgc |
| 211603_s_at | ggtgctgccctgtgtacatataaatgaatctggtgttggggaaaccttcatctgaaacccacagatgtctctggggcagatc |
| SEQ ID | cccactgtcctaccagttgccctagcccagactctgagctgctcaccggagtcattgggaaggaaaagtggagaaatggcaa |
| NO: 311 | gtctagagtctcagaaactcccctgggggtttcacctgggccctggaggaattcagctcagcttcttcctaggtccaagccc |
| | cccacaccttttccccaaccacagagaacaagagtttgttctgttctgggggacagagaaggcgcttcccaacttcatactg |
| | gcaggagggtgaggaggttcactgagctccccagatctcccactgcggggagacagaagcctg |
| 211700_s_at | ccagcacgggcttcagtagtggacccagttctattgttggcttcagcggtggaccaagcactggtgttggcttctgcagtgg |
| SEQ ID | accaagcaccagtggcttcagcggtggaccgagcacaggagctggcttcggcggtggaccaaacactggtgctggctttggt |
| NO: 312 | ggtggaccgagcaccagtgctggctttggcagtggagccgccagtcttggtgcctgtggcttctcgtatggctagtgagg |
| 212349_at | tggagtgtgttcctgaagagcagccaggaggccagcatggctggagaggcaggcataggcagggaaccgagcagcaggtcag |
| SEQ ID | agcaggcgagctgacattctgcagcctggacggccatggcaggaagcttttagttggagagatacaggaagcctcctagggt |
| NO: 313 | tctgagcagaagaggggcatgagctgattcacattctgaaggacctctctagctggccagtgctgaggaggttggagagaga |
| | aagggtgaaagcagagagaccagtgcagggctgttaacagggttgcaggcgagagactggggtgctgggctcccctagacta |
| | ggactccagtgccctcctctcccaagagacaaaggccattgc |
| 212654_at | ggtggccgagagtaaatgtggggacctagaggaggagctgaaaattgttaccaacaacttgaaatccctggaggcccaggcg |
| SEQ ID | gacaagtattccaccaaagaagataaatatgaagaggagatcaaactgttggaggagaagctgaaggaggctgagacccgag |
| NO: 314 | cagagtttgccgagaggtctgtggcaaagttggagaaaaccatcgatgacctagaagatgaagtctatgcccagaagatgaa |
| | gtacaaggccattagcgaggaactggacaacgcactcaatgacatcacctccctctgagccccacgccagcgtggccacctc |
| | agctctcttctctcctctcctttccattctctctatggggaggggagcaggcaggaggagcagaaattgccaacattgcaca |
| | gccaggctgggagcagcctagggagagcccc |
| 212671_s_at | accaatgaggttcctgaggtcacagtgttttccaagtctcccgtgacactgggtcagcccaacaccctcatctgtcttgtgg |
| SEQ ID | acaacatctttcctcctgtggtcaacatcacatggctgagcaatgggcactcagtcacagaaggtgtttctgagaccagctt |
| NO: 315 | cctctccaagagtgatcattccttcttcaagatcagttacctcaccttcctcccttctgatgatgagatttatgactgcaag |
| | gtggagcactggggcctggatgagcctcttctgaaacactgggagcctg |
| 212877_at | gaggaaaatgaagctcgggctggttaactgacttgctcagcgtcccatggcctagccgcccgtgactctcacactgtctcct |
| SEQ ID | gcatgacgggtggcgcctcccgcagcttcccttctctctccagtgctgcccgctgtgtctagcagcctctaggatcttgtca |
| NO: 316 | gagctgcacctctctgtgaactggccattcctttcggtgctgctgtcctttttgggggggttcctgatttctgtatacatgt |
| | agctttgccagatatgtacttagtaatataaactgtattaataaaatccatttactgtgt |
| 213008_at | tacatttttccacgagctggtgcagacagctctgccatcaggcagctgtgtggacaccttgttaaaggacttgtgcaaaatg |
| SEQ ID | tacaccacacttacagcccttgtcagatattatctccaggtgtgtcagagctccggaggaattccaaaaaatatggaaaagc |
| NO: 317 | tggtgaagctgtctggttctcatctgacccccctgtgttattctttcatttcttacgtacagaataagagtaagagcctgaa |
| | ctatacgggagagaaaaaggagaaacctgctgccgttgccacagccatggccagagttcttcgggaaaccaagccaatccct |
| | aacctcatctttgccatagaacagtatgaaaaatttctcatccacctttctaagaagtccaaggtgaacctgatgcagcaca |
| | tgaagctcagcacctcacgagacttcaagatcaaaggaaacatcctagacatggttcttcgagaggatggngaagatgaaaa |
| | tgaagagggcactgcatcagagcatgggg |
| 213539_at | gggaacactgctctcagacattacaagactggacctgggaaaacgcatcctggacccacgaggaatatataggtgtaatggg |
| SEQ ID | acagatatatacaaggacaaagaatctaccgtgcaagttcattatcgaatgtgccagagctgtgtggagctggatccagcca |
| NO: 318 | ccgtggctggcatcattgtcactgatgtcattgccactctgctccttgctttgggagtcttctgctttgctggacatgagac |
| | tggaaggctgtctggggctgccgacacacaagctctgttgaggaatgaccaggtctatcagcccctccgagatcgagatgat |
| | gctcagtacagccaccttggaggaaactgggctcggaacaagtgaacctgagactggtggcttctagaagcagccattacca |
| | actgtacct |
| 214901_at | cgaagccggcggcgtgaacaatcctcgagcaggaactcacacctggttcagcatcaacacccgaactccagaaagagctctg |
| SEQ ID | caggcggagcaaaggcagggcagccggaaagcagagccctggctttgtttgacatccaaaaaatcatgcaagagaaaaaccc |
| NO: 319 | tgtgcacgttattggggtggaagagccttctgtgggtgcttccatgttatttgacatcagagaatccacataggagagaaac |
| | tttgctgatgacttttaaccacaagtaaaaaatgtggtaagtccacatagtgtactcatggaaggaggggctgggggtagaa |
| | atgtcatgggtgacttctgactttctaaggaaatgatgcttcccaagcacccgaggttggttggtcccaaatctatcaaact |
| | cagtgccctctttagcgacatattttgtgacattccttccattacaccacagtgagttcacaggtaatataacctacccacc |
| | tgtgtaatgtcaaaaaaaatcaatatgcggccccattttgta |
| 216438_s_at | acagagacgcaagagaaaaatccactgccttccaaagaaacgattgaacaggagaagcaagcaggcgaatcgtaatgaggcg |
| SEQ ID | tgtgccgtcaatatgcactgtacattccacaagcattgccttcttattttacttcttttagctgtttaactctgtaagatgc |
| NO: 320 | aaagaggttggatcaagtttaaatgactgtgctgcccctttcacatcaaagaactactgacaacgaaggccgcgactgcctc |
| | tcccatctgtctatctggctggcagggaaggaaagaacttgcatgttggtgaaggaagaagtggggtgggacaacagtgaaa |
| | tctaaagtaaaaccaagctggcccaaggtgtcctgcaggctgtaatgcagtttaatcagagtg |
| 216920_s_at | cactactgctgcagctcacaaacacctctgcatattacatgtacctcctcctgctcctcaagagtgtggtctattttgccat |
| SEQ ID | catcacctgctgtctgcttngaagaacggctttctgctgcaatggagagaaatcataacagacggtggcacaaggaggccat |
| NO: 321 | cttttcctcatcggttattgtccctagaagcgtcnncnnannnnnnnnttgggctttctttctgggtttgggccatttcagt |
| | tctcatgtgtgtactattctatctattgtataatggttttcaaaccagtgggcacacagagaacctcactctgtaataacaa |
| | tgaggaatagccatggcgatctccagcaccaatctctccatgttttccacagctcctccagccaacccaaatagcgcctgct |
| | atagtgtagacagcctgcggcttctagccttgtccctctcttagtgttctttaatcagataactgcctggaagcctttcatt |
| | ttacacgccctgaagcagtcttctttgctagttgaattatgtggtgtgtttttccgtaata |
| 217456_x_at | cgacagtgcccaggggtctgagtctcacagcttgtaaagcctgagacagctgccttgtgtgcgactgagatgcacagctgcc |
| SEQ ID | ttgtgtgcgactgagatgcaggatttcctcacgcctcccctatgtgtcttaggggactctggcttctctttttgcaagggcc |
| NO: 322 | tctgaatctgtctgtgtccctgttagcacaatgtgaggaggtcagagaaacagtccacctctgtgtctaccatgaccccctt |
| | cctcacatgacctgtgttccttccctgttctcttttctattaaaaataagaacctgggcagagtgcggcagtcatgcctgta |
| | atcccagcattagggaggccgaggagggcagatcagaggtcaggagatcgaaaccatcctgctaagaggtgaaccgtctcta |
| | ctaaaaatacaaaaattagctggcgcagaggcaggctgtgatccagctactcaggagcgagc |
| 217885_at | gatgacaattcagaccaggctcaccggtgccgtcacttaggaatgctggaacaaaggacatttctcaaagttcccctgaaga |
| SEQ ID | catgccatctctagaaccttttttctccccgactctacccccacctctgttcctagagccctctgctggcgagtccagaaac |
| NO: 323 | attattgcccagaaggattatgtgtttatggattattttgccccgcctcaggagcgcaggaagtcactaccatttatattct |
| | aaaacagaactatctatgttcataggacttctgatgtgttcagataggaatcctcatgagagatcattatgctttgtgccct |
| | ggaccactgccgctctgggttctcaggaggaacaggcaagggcagcttcattctaagcctttccagtgacctcagccttgct |
| | tctcttctacaacactaaggctcctctgtcagaggaggtcgtcttgtttttgcttcattgcatgacataacccttccc |
| 217995_at | tacgtcaaagaccgctgctgcagtagctgcccagtcaggaatacttgataggacaatttctgtaattatgaagaatcaaaca |
| SEQ ID | ccaacaaagaagtatgatggctacacatcatgtccactggtgaccggctacaaccgtgtgattcttgctgagtttgactaca |
| NO: 324 | aagcagagccgctagaaaccttcccctttgatcaaagcaaagagcgcctttccatgtatctcatgaaagctgacctgatgcc |
| | tttcctgtattggaatatgatgctaaggggttactggggaggaccagcgtttctgcgcaagttgtttcatctaggtatgagt |
| | taaggatggctcagcacttgctcatcttggatggcttctgggccaaaactgcagtcactgaatgaccaagagcagcacgaag |
| | gacttggaacctatccttgtaaagagttccttgatgggtaatggtgaccaaatgcctcccttttcagtacctttgaacagca |
| | accatgtgggctactcatgatgggcttgat |
| 218363_at | tctggacatgagcctttgacctgggtggggcagaaagaaccacaaactccatctcccaatagaactttgaaattcactcagc |
| SEQ ID | ttttcctttcatgctgtttgttgcctgcttgttgcactcctcctgccccagaactgcaagatttttagcttcacccctttct |
| NO: 325 | gagagtaatgttatcttttatcagaatcagtatcagttcccctgtattctgtgcttcatcgaatttgcaagactgacctctt |
| | ttaagcatttaattcactcccagagtcatctggtcaggttgcaatatgaggacttctctgtctcctctgaagcctgggacac |
| | tgagcttacttaatacat |
| 218807_at | tgccgtcagccgaactttgttatggagggagcagcctcacacaagcagaaacactcctgtggatggtattgtagcatgtatt |
| SEQ ID | gtttattttagtcaatagaccctctccttataaatggtgtttagtcttcctgttgcatttcatgggcctgggggtttcctng |
| NO: 326 | cagaggatattggagcccctttttgtgacattaccaattacatctttgtccacgtttaatactttgttttggaaaatttaaa |
| | tgctgcagatttgtgtagagttctaataccaaagacagaagtaaatgttttccatatactttgtcttgcctgtatgcagccc |
| | ttgtgtaatatggt |
| 221265_s_at | tcacctctagaatagccacccaaagaccttcctgaggctgcctcagaagcaccacttgctgttttgaatgactctactagta |
| SEQ ID | tgagaaggatgtgaaggtggttggctggttgggctttaacttcctgggattcataatttttaagcttggaagatagctgctg |
| NO: 327 | ttcccatgatgggcacatttcctgagaagcttgaatgactgatgagcatagagcacccctgccttcctcaggaaacctgacc |
| | ggcaggggctctctggcttcctgaaagcttcacctcttccctcgtttatatctcaactgtaagggcattttcaagcttctgt |
| | tcatggaatgagcaactcagactgtctggagcttgctgagtacaaacacaccaccactaagtttcagaactttccttaggac |
| | ttg |
| 221875_x_at | tctaccctgcggagatcacgctgacctggcagcgggatggggaggaacagacccaggacacagagcttgtggagaccaggcc |
| SEQ ID | tgcaggggatggaaccttccagaagtgggccgctgtggtggtgcctnctggagaggaacagagatacacatgccatgtgcag |
| NO: 328 | cacgaggggctgccccagcccctcatcctgagatgggagcagtctccccagcccaccatccccatcgtgggcatcgttgctg |
| | gccttgttgtccttggagctgtggtcactggagctgtggtcgctgctgtgatgtggaggaagaagagctcagatagaaacag |
| | agggagctactctcaggctgcagtgtgagacagcttccttgtgtgggactgagaagcaagatatcaatgtagcagaattgca |
| | cttgtgcctcacgaacata |
| 223168_at | atacttgagattttcctccatttttatttcttcgtgaacatagagtttggggccgaaaatgtttttaaagtatgtgtttgag |
| SEQ ID | ttaaatataaagttggttcacttcaaagctaaaaaattgttaaacttgcagcttggtattgcagagaagattttataagaat |
| NO: 329 | tttgctttagagaatgccactttggctgaactacaagtgtaggccaccattataatttataaatacagcatacttcaaaact |
| | gtttgttatctcttgttaccatgtatgtataaatggaccttttataaccttgttctctgcttgacagactcaagagaaacta |
| | cccaggtattacacaagccaaaatgggagcaaggccttctctccagactatcgtaacctggtgccttaccaagttgtgcttt |
| | tctgt |
| 223593_at | ggcagctgcagacaagtggttaactggtttggcagaatggcatgttcctgctgctggaatgtttttatggattaaagttaaa |
| SEQ ID | ggcattaatgatgtaaaagaactgattgaagaaaaggccgttaagatgggggtattaatgctccctggaaatgctttctacg |
| NO: 330 | tcgatagctcagctcctagcccttacttgagagcatccttctcttcagcttctccagaacagatggatgtggccttccaggt |
| | attagcacaacttataaaagaatctttatgaagaaattaaactaggttgggcatggtgcgtcacacctataatcccagcact |
| | ttgggaggcagaggagggaggatcacttgaacccaggaattcaggctgcagtaagctacgatcacaccactgcactctggcc |
| | tgcatgcactctggcctgcatggcagaacaagaccctgtctctaaaaaaagagaaagaaatcaaactaatcatgctgctcat |
| 223646_s_at | aaaatactggacccacttctttcagaagagatgaagataccttatatgccctaaagttaataccagcagtcatattttatca |
| SEQ ID | gatgtaaatctggatgtaagctcttaatgttatactaaggcagtttcttaggctgtgacacttctttgtggtacttgttttg |
| NO: 331 | tgtgaaaggtaaattttggggagaaaacaatgtgaaaaacagaacttgttctgttgtttttggcatactgtttatgttagat |
| | acactgtgttacaatacaatattacgaagatctgcattgtattttggaatttggtttcctttcagaattattgctctggcta |
| | gcattggaaacaacaacaacaacaaaacccaaaggaaccctttgcagaagattcccttgtaaatggccctgtggcatgccca |
| | gtatctgcaatgttctagaatagaagttggcaaacctctctgtttgccaagcctgcagagttgaacatgtccataaatgtat |
| | acaatctgaccctgttttttggccctgtttctggacactgtagctga |
| 223746_at | gattcctggtctttttaacacgaagaatatctattgttttctcttttgtaggatctgtatgattttatctacttaacagata |
| SEQ ID | gcactaattagattaaaattctataagaaactttttaatttgctgttcataatttctgattggtatgcaataactgtttcaa |
| NO: 332 | tgaaaatcaatgtaatttagtattttaatatttgcacctttgtgaaatatagtaaataaattaagcactatcaccaccttca |
| | cagctacttaggagatccacaatcctgggttgggagccagtggatttcctgaaacacagatttgttaatgcgtttataaaat |
| | actgatgaaatgatattagtaatgtgcagtgaccatcattgactttcatgatacaattaagtttacataatttttatacttt |
| | tatatatcattttaattcaatcctgtgtatttattccttcttctgtaatgacca |
| 223819_x_at | gaccagctccaggagctctgcatcccccaagacctggtcggggacttggccagcgtggtatttgggagccagcggcccctcc |
| SEQ ID | ttgattctgtggcccagcagcagggggcctggctgccgcatgttgctgactttcggtggcgggtggatgtagcaatctccac |
| NO: 333 | cagtgccctggctcgctccctgcagccgagcgtcctgatgcagctgaagctttcagatgggtcagcataccgctttgaggtc |
| | cccacagccaagttccaggagctgcggtacagcgtggccctggtcctaaaggagatggcagatctggagaagaggtgtgagc |
| | gcagactgcaggactgacccctcacttgaccagtcccattcagatccggcttggacaggcacctgagatggtgccaaagtgc |
| | agctgactcttcccacgacagccctgcccttcccatgaggcaggctcttcagtgagtgtttgaacgtaattatgtagttttc |
| | tgtttaattgaaaaagagagctatgcctttttttctttttgg |
| 223945_x_at | caacattctcttctcaaacactgaccaaggaacagaggaagatgcagtcagagaaagtagcaggatagagacgccgagagag |
| SEQ ID | gagtatatgtgggtcacagcagtgagctcccacccgccttgcagtgaagatgtgaccccaggagagggagtgtctccttcca |
| NO: 334 | ggtgctagctctggacagcagctgattttaggcaggaaagtttcttcatcgttgtcctccctgctggtcacatgagtttacg |
| | attccttagaagtgtctcccacagggtggcaggactgggagaatctctgaggcgtgtcttccaggccctcccacagcttgtg |
| | ccctccacagtgtaggcttgaacacttggcctcatgcg |
| 224153_s_at | gcagaacatatgtaaccagaaggacaaatccacccttcccttttgtcaagcacatctgtgtgaagagaccaccaacaggctt |
| SEQ ID | tgtgtgagcaacaaggctgtttattcacttgagtgcaagtgggctgagtctgaaaacagagtcagtgaagggagatggggaa |
| NO: 335 | ggggttgctttataggagttgggtaggtaatggaaaattacagtaaaaagtggttatctattgttagcagaggagggggtca |
| | caaggtacatggtggggagatgataagacccattgtccagaagaagactgtcacaaggtcgattgatcagttaaggtaggac |
| | agggacaggtcacaatggtggaatgttgtaatgttggttaatcagttaaggcaggaactggctgttttacttcttgtgtggt |
| | ttttcagctgccc |
| 224908_s_at | accaagcctggctttatgtatttatttctgttcatgcggaatgattggttcagaactgttcctttcccttccatgatgtcct |
| SEQ ID | tgacacagaaggttatgcctggctcccagtcaggcttcatacttttggtccatgtaagtgctacccgttgctgggggaggag |
| NO: 336 | tcatggtttatttggaaatgtcagttgcaatcatggttctgtcatttgactgcacagtatcagaggagcctgttaacctctc |
| | tgtgccttagtttcttagcccatgaaagagatcattgcctgacccagggactacctcaagggcttttgatgaggacaagtga |
| | cagtaggaagatgcaagagcctttagtaccaaggttctcaacactgactacatgctggaatgactgtgaagcttttaaaaaa |
| | tgttagtgcccactcttcccctgtacccccggacagttaaatcagaacctcagacagcaatatgccttgagatgccttgaac |
| | catgcttgaga |
| 225432_s_at | ggcgctgatgcgaatacagctcacagagaaacgcatgtgctattggagaacaggtctttgtggagatctaaaggcagtgatt |
| SEQ ID | gatttcacagggagctctaatctctgtgattacatggtccttcaaactcccaaccaaagtgagaaaagcggcatgcagtgaa |
| NO: 337 | atgagcagtgagcagccctttagcaaaatcgccctccagtccttcctggagatgccttcagccagcatcccagactccacag |
| | ttatttatgaangatgtcgtgattctccctccacctgacagtttgtaagagtgaaagagcatctaacctgatgctcttggag |
| | agagataacctgtctgtcataacttaaaggatgagaaaatgtggtgtagctattaaagattcatgcagtcccaaaaggcact |
| | gtcctgggatgatgagagattataaggtgatttcataaaaggaatccaaccctgtgcc |
| 225502_at | gaagccttactacaattccaaaaatcatcatggttggaaatttgggaggagattatttgtgaacttgttacccttttggtaa |
| SEQ ID | tggtggactaattgctgtatagttatttttgttttattattactgttacattaatttaacatgcatttatagaagaatacat |
| NO: 338 | tcaaagcactgatgtaggagatacacggtacttggagcagtcagccaaaaatcacagatactgctttcacttaaatggaaac |
| | aattctccgataatgctttgctttttttcttatgtcactcttgtgtactatctatttttctcctctctgggaccaagtttct |
| | ttttataaagcaataatatctctgttttcatttcagaacatt |
| 225736_at | cctctggatattgatgcctcgggtgtggttggactgtcatttagtggacaccgaatccagagtgccactgtgctcctcaacg |
| SEQ ID | aggacgtcagtgatgagaagactgctgaggctgcgatgcagcgcctcaaagcggccaacattccagagcataacaccattgg |
| NO: 339 | cttcatgtttgcatgcgttggcaggggctttcagtattacagagccaaggggaatgttgaggctgatgcatttagaaagttt |
| | tttcctagtgttcccttattcggcttctttggaaatggagaaattggatgtgatcggatagtcactgggaactttatattga |
| | ggaaatgtaatgaggtaaaagatgatgatctgtttcatagctatacaacaataatggcactcatacatctggggtcat |
| 225853_at | acatatgtcggctaccgtgtctggccgttcacatctttggccactatttgcttgtgaaaaggtataatgaggtggtacttat |
| SEQ ID | catttttactgtgtctcatgttttgtatatttttgtttcatcaactaagatgcactgtaacatctctgaaatctggatatat |
| NO: 340 | tatcaatggtttatcatagttttgttagcaatacactgtcttttagtggtgcctaaaataatggtatagttgtgaggtgatc |
| | ttagatttgatgaagcacagtatgcaggtaggcctaatgggggaagatggtaatataaaagcaagaagtattttttttttgt |
| | aatgactgaaagctgttctgtggatgacctaccctttcctttaaacacgattctctcacttccaactccaaacttgctcaac |
| | taat |
| 225882_at | gcaccttacatatttgatgctcaggaagaaagtgcaagaagatccctaatagaacattaaagattcttaaaagtttttgaag |
| SEQ ID | taggctgcttggggtgaccagccccacccttacatctccatagttggtacagttagcttgtagcagctgaagctgatgcctg |
| NO: 341 | gagatcactgtctgttggtctgatctcagtatcatactgagacacctcccctgagccttacctacttaaattggtaaccgtc |
| | ctaccaaaatttgtcaattttaatcaagtgaggcaagttgcaagggagccagagatacgtgaaaaaagaaaagcagaaatac |
| | tgatactttctaagaaagaagttgtaataatttctttggcacattgacttactgatatcttttgaaatgcatagangactct |
| | tgtgaaccaaagagagcagtagtggttattccccggcgcaataaaaatgcc |
| 226043_at | agtgggggggtggtcagtggaagctggggaggcttcactcagctcaaccctgcagaccccccatatgagaacccccctcctc |
| SEQ ID | ccaccagctgggggagatgacatcactgctctctccatggggagggggctcacagggcaccaagttcgggatcctaggactg |
| NO: 342 | gcaggacctgctggagcctgagatgggccccaggggcctgaggttgcctcctcctgtccagacccagccttggcacctccca |
| | agactgccaagggccctaccatggccccacagcccccagggctggcagttccatctaggagggtgcctctaggccccactct |
| | caggctaggatggagaggcagatctgggcctggngaggtgacctgcttctggaggggcagggccgcacccgagagcagggac |
| | aggtgcccgaacacagggtctccaggacgtagcgcccccccgcatacttgaatgtatgtgcgtatttattgctcacgtctgt |
| | gccatgttgtcaatgggtcctttccaacccaagaggtacatttg |
| 226778_at | gaaactctggaaatcacgtgtgtggggagatggggacgcttcccatgttgtggggagctctgtggctgtgatggctgcagtt |
| SEQ ID | gccgtgcctctgttggaacgcnaagtgcctgcaactcacgtcaatcatagaattgtgacgcacagttggcaaaatagttctt |
| NO: 343 | tatgctatttctcaaaantttgaggacaaacccagattgggattggaatatgcactgtaaatcaaatttttcttatctacaa |
| | agactaatgtaaaaatgattttttcttctgtgcctgattaaattaactgtggtttttaatataaatatttattggtgtgctt |
| | tgggagaaaaattatcttttcttgaaagaanttatcaaagcaaatttattatcttcacaagttaatgggagaatgtggtttt |
| | gattctgggtgtttgaattgtgtaaacacacagcttccttgtg |
| 227035_x_at | caacattctcttctcaaacactgaccaaggaacagaggaagatgcagtcagagaaagnagcaggatagagacgccgagagag |
| SEQ ID | gagtatatgtgggtcacagcagtgagctcccacccgccttgcagtgaagatgtgaccccaggagagggagtgtctccttcca |
| NO: 344 | ggtgctagctctggacagcagctgattttaggcaggaaagtttcttcatcgttgtcctccctgctggtcacatgagtttacg |
| | attccttagaagtgtctcccacagggtggcaggactgggagaatctctgaggcgtgtcttccaggccctcccacagcttgtg |
| | ccctccacagtgtagacttgaacacttggcctcatgtgatccttc |
| 228376_at | ggtcaggggatcagacactccagttgggtcttttatataaattaaatggcaaaaggctccatacccttctccttctttccta |
| SEQ ID | ccctccactttatctgcaaaatgggaatgatgataacacccacttcatagaatggtcatgaagatcaaatgagagaataaaa |
| NO: 345 | gtcaagcacttagcctctggtgcacaataagtattaaataagtatacctattcctccttttccttttttaaaaataatatta |
| | ccaaatgtccagcttatacacatttacaagacttagctagtgggctatgttagagctactaaaagatctttgacaagctaaa |
| | actaagatgcaatgaatgaggtgtaacgaacaagagagttttaagttcagaaatggttacagaagtataagacagctgtgtg |
| | ggtgttttttggtttttggtttctggtttacaatctcgtcattcaacaaagatgggagttttatagaactaaaagcaccatg |
| | taagctactaaaaacaacaacaaaaaaggctcatcatttctcagtctgaat |
| 228604_at | gaaatggtggtttccttctgataagggatacagtggaccatgtcgcttatatatcaccctactaggggatataattttccct |
| SEQ ID | tctaagcaagggaaatggcagtgctaaatagttttgtaaagtttttgaatgagaagcttttaggtaaagataaactgtcata |
| NO: 346 | atatttttcagatgcatttgcattgactatgggagaaaaattagggggaaatgacagtcatggtgtttttttttaattttaa |
| | ggactgaaattctgttacatgatgtatgacaatataaaaacatacttagttttatactaaatctttttttaaggtcttggca |
| | tttaatataaagcaaattcacacgttttctaactttccataagttccaaaaagggaaagaagaaacctcagtcttgaaattt |
| | tgatttttaaaaatcatgacactgttttaccatgaaattgagtagctaacttttggtaacacct |
| 228786_at | cacacgcagatcctgcactgtactgtccagtcaactgacttcagcaaagatgtctgggttcagcagcgagttgctgtgtgag |
| SEQ ID | gccaccagaatggaggtgatatcggcctcagtgctcatcctggaggtggagaagtggtcagagtcctctgtggtgaaatggc |
| NO: 347 | cctacaccaaagtgggagacattcagaatcgaggcgaaattggcctcagtgctcctcttggaggcagagaagcagtaggagt |
| | cggtggtgaaatggccctgtgtgaatgtggaagaccagcagattggaggtggaattggcctcagtgcttgtcctggaggtgg |
| | agaagcggtcagagtccttggtggtgaagtggccctgcacaaaacgttgctcccccttggccggtgaaagaataaaagaaag |
| | ctggccncttgcatttcngtttcagttnanagaanacatgttttggaaatagtatcttctagatctgtctttttctcttctg |
| | atttaacttagtaaagctaagttttatctcttc |
| 228812_at | gagacttcattggtgatacactcaatttttactgggtaattagctaataatgttggtcactgtctcacagttcaagtagctt |
| SEQ ID | taagatgatgtggcaaggaaaacacaaagcttttgggtaaccagcgttcttaaatgtatggtttttgaccaggtgaaccctt |
| NO: 348 | tagaagtgatttctgttttaaaagtatgtacttaaaatacctttggctgtgatgaatgtagatcccagcagaataccaaaat |
| | cctattttttttgactgagtatttgtagatgcttaatgactgaaatgaatttggaggcactgatgaaagtgatttttttnaa |
| | gttctcaggtactgttcaattat |
| 229598_at | atttttcttagctaaatctggcaactgtgnctatttcattgaaaacctgaaagtgtacaaagaaggaagaagcagaatctgc |
| SEQ ID | catatgagtaatagaagtgagcaggcccaggactccctaagtcaagaaaccaagaggcgtcattacggaaaagagtaactca |
| NO: 349 | ccctgtgtgctccttggtagttctccctcagcgatgcccccatgttatgaatggggaaaagttcactgaagggttcatagtg |
| | aagaaactttttggatgatttctgttggtgggttttggataccttcaagggatcagaaaataatatacttaggaaattttgg |
| | taatgtcatcattactctctacattattattatgacggttacaattgttaaatctaggtggtgggtatgtgggttatattgt |
| | acatgatttttaacttgtctgcatgtttgaaa |
| 231229_at | gcacgtccaaggtgatcctgagggctgtggcggacnaaggggacctgcaagtatntgtccctgnncaccctgaagaaggctg |
| SEQ ID | tttccaccacgggntacgacatggcccgaaatgcctatcacttcaagcgtgtgctcaaggggctggtggacaagggctcagc |
| NO: 350 | aggtgaccggcangggggcctcaggctccttcaccctgggcaagaagcaggcctccaagtccaagctcaaggtcaagaggca |
| | acgacagcagaggtggcgctctgggcagcgcccctttggacagcacaggtcactactgggctccaaacaggggcacaagcgg |
| | cttatcaagggggttcgaagggtggccaagtgccactgcaattaatgaggcaggccaggcaagcagtcaggggtgccaagan |
| | cgccattggctcagtgcagtgggaa |
| 232019_at | cctcggctcctcatctgaagagaagttgaacttaactgctaagttgctctggctctaatgtttcatgaggctgtggagcgtg |
| SEQ ID | atatagatgcggaagaggttagaagaccaggntgccggccnagctgtcctgtgcctgccacatctggccataccaaatccat |
| NO: 351 | cgcatgcttcaggaaagggaggggatgctgtgacagcaaactcagcccaggagcttgttggggaaggagaaagggcaagtcc |
| | ctcgtggtccacagcaggcaccccccaagcacctcgataaccagtggcaggtaggctgaagtgaaggaagcctctgtcagga |
| | ggtctggcgcccagtgacagacaagacagctgtgagggagctggggcagccctggctaaaggaatgtctgagtaacttgtga |
| | aactggaagcctctgcctctgaatgcattccaaga |
| 232311_at | acataccttgggttgatccacttaggaacctcagataataacatctgccacgtatagagcaattgctatgtcccaggcactc |
| SEQ ID | tactagacacttcatacagtttagaaaatcagatgggtgtagatcaaggcaggagcaggaaccaaaaagaaaggcataaaca |
| NO: 352 | taagaaaaaaaatggaaggggtggnaaacagagtacaataacatgagtaatttgatgggggctattatgaactgagaaatga |
| | actttgaaaagtatcttggggccaaatcatgtagactcttgagtgatgtgttaaggaatgctatgagtgctgagagggcatc |
| | agaagtccttgagagcctcc |
| 235391_at | atttcacggcaaagctttagaggtctacactgctgcctaccagaatatacaaaacattgatgaagatgaagatttagaggtt |
| SEQ ID | ttccnaaattctctgtatgcaccagattattcatctcgtttagatattgtaagagcaaattcaaagtcacctcttcagagat |
| NO: 353 | cactgtcagctaagtgtgtatctggaacaggacaggtatccacttgtcgactaagaaaggatcaacaagcagaagatgatga |
| | ggatgacgagttagatgttacagaagaagaaaattttcttaagtaaactacacatttccattttcatcataaatgacttgaa |
| | atccacaatgactaaattgtagaactttatactcactttgctatgttaagcctcaaagtgaagtccaactgg |
| 235421_at | ataccttcacaatctgaactttctctagatgggcacagatcatgaataactcagaaaccattagcatattgtgtgcttaatt |
| SEQ ID | aaggctggaaagtgctgaggctttttgcaggcgcagttagcaggcgaactggtcagcagggtttctggggaacgtagatttg |
| NO: 354 | cgtgacaggggccctgtgttgctaaggaattaatgcaggcactgagaaaagtctcagcgtcagacactcctccacctcccgg |
| | gtcctgcttccctccctctcccctttccaggcaactcacagtttaggggtgtggttgtgtgtgttcaagctcttgggtttta |
| | catataaatgcctgagacttttctgcagggtttaaaaactaacatcttgtcttacagctctttta |
| 235473_at | ggaaatcaagatctgcgtgctgggtatgttcattgctactggggtgtcattgcttctaggccttttcaactgacagggtcag |
| SEQ ID | taatggagtaaaactcattgtaatcgtgtaacttatgtgggttaagaaattgaactttgctagtaccccagaagctccttta |
| NO: 355 | tgtcccctcctgattttaacgcttaatcaccttcatcctcagttttatggtaatcacttgtctttgcagttttagtctgtaa |
| | ccatgcatccctaaataaatgtttagattgcctattttaaaaatttaatataattggttcaatgtgtgcatttcatgtatga |
| | cttcttttatgtctgtgatgttca |
| 235688_s_at | tgaggcagtgcatgttcttggcccagagtaagtgcttagtgaatgctttctaactccgaaccccagccacatccagggactg |
| SEQ ID | ggtgttgagcaaaaggggccttcaagatgttcaaggcacttggattttctcctgtctctcatcggcttttcttaacgggcct |
| NO: 356 | cagtgggtgcatgtgattatccacgtttcacctatgaaacatgaacagaggagactgacttatcagtgattcttccgcgggt |
| | tcggacagggcctcgattctgttttaaactccagtagtccctagaaattgtagctccctctagttgtggcaataggtgtggg |
| | tccttgtgcttgcttttggcaagtttntgagctacacagggcctccattaccgtcactggtgaaatgcggctcacctccc |
| 236203_at | atgtcaggtttgtacctaccacatttaaaatagggacttgaagaattaaacattttattacaaatgaagcacttcatgcaca |
| SEQ ID | gactggcacatagtaagtagtcgataggtgttaacaatttgtgttattgttattttctggagtccaactaacaaatcccaca |
| NO: 357 | gtgaatgacatcacagggatgcaaccaacaagatccagaatatggaaacttctactagataaacaactccatttcttcagca |
| | acaattcaagagagagagagaagagaagctatacattttaaaaggctgaagaaatatatgaaccaaatttgtatgaggcaat |
| | cagaaaaactgacaccgactgtattaaggaattatctaattttagtgtggtaatgagattgctgttatgttttctaa |
| 236627_at | aactagatttttgaccctcactcatctggctttccttgctatagacatgctttgcatacccagcttctagccacatcttccc |
| SEQ ID | taagaaaatttcancctggaatcagttccaaaagaaaatcttaagagatagagtatggatctgcatgttgtcagctacctaa |
| NO: 358 | agcagcaaaaattcctagatgagaataaaatcagggaaccttgcagtttaaggcacaccttaaatattaaatttttaatcct |
| | tcaatgcatccagccaaaacaagaaattgcaaatagctaccatccatcaatgcaaggttttt |
| 236681_at | gaaactcatgtgtcctcatggatcgtggatgccttcatttcttgagctctcaatgcagacatttaaatggctgcaatcagta |
| SEQ ID | gagtgacccgcggatggcataaatgcacctccttttcttggccttggatctatgggtctgggattgtggtcatctcctcaat |
| NO: 359 | cctcaaaaagaggctgaatcaatgtggccgtgggtgggaacttacatacagaacccaatgaagaacttgactgtctaaacaa |
| | gggggcctcgcatggagctgtaaagcatctaacaaatatgaaaaatgtgaagttccaaggtccaagaagaaaaataatgatg |
| | tttctgaaagtgatgataaataattacttttaaagtgctgcatatttatacaattgagagattatttttgtaaatgcaatgt |
| | ctgtgagctgggatacatgggcagtgcttcagac |
| 237439_at | tatttttaatgccttttcctgggataagcattaaagatgnccnaaaagaaaanaaaaacnaaagaatgatagtgatggtaag |
| SEQ ID | gcaagattctagcaaagagagatgggagataaatggctgagagttcaggtgaatat |
| NO: 360 | |
| 238925_at | ggcagcagtggcatggacaagcaactgctaattcgagacttactattggcttcacagcacaccctacagtgagcagggtgat |
| SEQ ID | gagaccgtggaacagctacctgcttttggttaagattgccagatatcattaggacacagtagcagcaagaatgctgattttg |
| NO: 361 | tagtgttagaaaatgaactcagcttgtttttcctaattttgaaggtggtatatatctgcaaacatttaaaatggtntaatat |
| | catataaaatgtcaaaattagcacagtccctggatctcaaagaataggtaatattgacttggatgttctttatgctctctga |
| | agaaaggtctagggaaagttcttgtttgcttgattgatcaagagtgccacggaagaatgtgagcgctgtggagggtggagga |
| | gggtgtcacttcagatggggcaggcaca |
| 239486_at | taaagttgggcagtaatcttaattatgatggaattatcattatgctaagtaattaactttacctagtttgttttacaactag |
| SEQ ID | aacctgccctaaatgttgaatatcttcctagcaagaaacagtctgtcattttacttacacgatgtctaaccaaaccataact |
| NO: 362 | ttacataaactagtcgtttcggtcaaatagaaaaatgtgtgaatgccataaaaacaaaaattctcagttaaatgatactggg |
| | aaatagggaagacagcaaagtgagacttgggctcanggatgngttcaggaanaaaaaaaaagaaagacccctgagtaccatt |
| | aatattcctcagaaattattatttcaaaaggaaatatttctgtattataaatttttcatgagcagccattatgaaatctcac |
| | aa |
| 241670_x_at | ttgcctgcggagcacgggtgggcattggatgtaaggtattcctaacttccccttccccagtccttggcgtcctctctancca |
| SEQ ID | tcccaccccaggtcttctgcagcttcaccctgtcctccaagtcccctcgcccagctgcgagncaggagaccccgnccggant |
| NO: 363 | ccgccagcaggnccttctttcgcagggcgcanacgcacgatnccgggatcgggtgcaccacngcgaancccangcgggagac |
| | ggcaggagcagctcaggtaaccaggggaagcttgcgtgcc |
| 241671_x_at | attctgaagccagaccgtctttcctcacagcnnnnnngnnncnnnnccgngggcacgcaagcttcccctggttacctgagct |
| SEQ ID | gctcctgccgtctcccgcntgggnttcgcngtggtgcacccgatcccggnatcgtgcgtntgcgccctgcgaaagaaggncc |
| NO: 364 | tgctggcggantccggncggggtctcctgnctcgcagctgggcgaggggacttggaggacagggtgaagctgcagaagacct |
| | ggggtgggatggntagagaggacgccaaggactggggaaggggaagttaggaataccttacatccaatgccca |
| 243010_at | gaaatacacccactctcttggaataatgacgtaccactcagttggaccctcaagagtcactgctttgtctgtgctggtagtt |
| SEQ ID | tgtgagaagtgacccgcacgcttccatttgatgcatttgatgtgagtgaatccatacatttgaatgtcattgtccttgagac |
| NO: 365 | cctacatgtgcagtttggctcatctcattaaagatgcttgatgtaataattggttagtttccttttattttcctgcaggctt |
| | ttccatgagtattatttttttcaaagaacaaatctgtatggcttttccccatctccatattttgttttgctatgaattgctt |
| | tgctttggtgaacttgtcctagtatgcttgcctcacaaacgttttagccattgtgaattttcttcatctctgtaaatagttc |
| | atctgtgcttctccctgatgacgttttattttttttcccctgtaagcaaccgaggtagaaaaataaattgtttaccatggan |
| | anannnnntgctgccgtctcttagcctgacagtgtcctgttctc |
| 243502_at | ttaatttctgtgaagagtgcccctggtgtttcatcttggcctgttttgatgagaatgttatcntttgtgtctggataacgcg |
| SEQ ID | tcagcttcttaaagtacatataaagatattctgtcaccnccccacatgcacacacttttaaaatctatttttattctcttgc |
| NO: 366 | taaagttgtaattatgtcaagaattttccagctctaactgccttcttagtacatgtctttctgcctttgaagcatatgagtt |
| | tgccaaagtcattctcccctaatgacatattgtggactta |
| 244393_x_at | cccagccgctataacttttaacaattcccatatgtcctttattccactaagatgagtgcagtatatatttccatctgtccaa |
| SEQ ID | ggcttcctaaatgtagccaangccaagccaacaccagtcacatgatcnaaatcaaagggcatttggggaatccaggctgtga |
| NO: 367 | ttcagggaagttccaagtgtctgatgaagtgtttgttttacatctttgtgtcccttgcaggtctagcactgtgctatgtagg |
| | taacatgtgctcc |
| 91684_g_at | agctgcgcaagatccaggcgcggatgggcgtgttcgcgcaggctgacggctcggcctacattgagcagggcaacaccaaggc |
| SEQ ID | actggctgtggtctacggcccgcac |
| NO: 368 | |

TABLE 12
105 PS gene list, target sequences

| | |
|---|---|
| Probe Set ID | Target sequence |

| | |
|---|---|
| 1555852_at | ccattctgagtacttctccgcaaaccctttgtttcattaaggactgttttacatgaagggtgcaaaagtaggataaaaatgag |
| SEQ ID | aaccctagggtgaaacacgtgacagaagaataaagactattgaatagtcctcttctctacccatggacnttggnatttttata |
| NO: 369 | ttngattttaaggaaatataacttagtagtaaagagatgagcattcaagtcaggcagacctgaatttgggtcaaggctgcgcc |
| | actcaaaagctatatgacctctatatgagcagcttattcaacctcttttaacctccattttgtcatctgtagaatgatgataaatgccta |
| | gctcagaaggattcc |
| 1556340_at | tcccccctggacaactgtatacccaagacagtccccagggcctcgcctgtctcccccagcccccgntaagcagtccagactcc |
| SEQ ID | aaccccaactgctggggtccatcatcccctataccaggggctatcccctcaacttggagggctggccaaa |
| NO: 370 | |
| 1558034_s_at | catctaccctgataacaccacagattttcaaagagcagatgacaaagtatatccaggagagcagtatacatacatgttgcttg |
| SEQ ID | ccactgaagaacaaagtcctggggaaggagatggcaattgtgtgactaggatttaccattcccacattgatgctccaaaagat |
| NO: 371 | attgcctcaggactcatcggacctttaataatctgtaaaaanngattctctagataaagaaaaangaaaaacatattgaccga |
| | gaatttgtggtgatgttnnctgtggtggatgaaaatttcagctggtacctagaagacaacattaaaacctactgctcagaacc |
| | agagaaagttgacaaagacaacgaagacttccaggagagtaacagaatgtattctgtgaatggatacacttttggaagtctcccagg |
| 1558290_a_at | ttttgcatgtctgacacccatgactccacctggaccttatggctccacccagaagcaattcagcccaacaggaggacagcttc |
| SEQ ID | aacccattacgatttcatctctgccccaaccactcagcagcaagcacctgttacctgtccacccccaccccttcccccaaact |
| NO: 372 | gcctttgaaaaatccctaacctatgagctttgaataagatgagtacgaacttcatcgccca |
| 1559263_s_at | gcttcctttgagaacaagtttgagttttagtaagctgtaaagctgttttatttgattcactgtgaataagacaagtacaaaaa |
| SEQ ID | aaaaagtgaaaacacagcacatttcaagtgtaatcccctttggaatttttccaaagtcttagtatatgtctttgtgacagaaa |
| NO: 373 | aacatagatgggacaggtaaatgaaatgttcctagttgcatagctgttaacc |
| 1559584_a_at | attcctgggctcgagagagccactcatccccatctctcagagtgttgggattacagccatgagccaccatgcccggccaaact |
| SEQ ID | tcagccttgaatattagtgattttgccatattagtttaccatctgtacaattatttgctttatntttttctttaaattggctc |
| NO: 374 | attattcacttaatgaaattattgcaacaggaatcttttgtatcacttctgtaaatggaaaaccagtctcatttgccatcaat |
| | agaaggt |
| 1561042_at | aaatgcagataaaggctacctctgaattctcaatagattcatcatgtttgctcttaagtgtagctgtccacactg |
| SEQ ID | |
| NO: 375 | |
| 1562031_at | atgttcactgtatgtgccaagcctaatatgagagctatgtattatagagtttatgctacagccctaccttcaggaaacttatc |
| SEQ ID | tactggacaaacaaaaattttcaaatatacaaaaaattctaaatcgaacattgtaattatctagcataggcaaatatagacag |
| NO: 376 | taacagacaggtttacaattattaagaaagggcagccagg |
| 1563497_at | taccatagcaagttcttatcctttgttaatatattataaatacgacttttttcctttacctgtcacagtaatatgccaatttt |
| SEQ ID | tggtgtcgctttagtaatttttttgggggggactgtcaaatttcagtaaactttataggctatagtttacaatttaaggtctt |
| NO: 377 | tcctcagttgtctcctaaaaaattttgtggaaatcgaaatttcttttcaattgatcgtcttgtgcagccctttaaaaaatgcg |
| | ttttgcattcatgtctttgcagtacaaatctgtatctttcattttgggagtgactgtcatagatgggtaatataaagtgacaa |
| | cacacacaccagggccagattgcgtgggttctagctagggacctagagctggttacttgatttctctctgttccatttactat |
| | ctg |
| 200904_at | tgtgccttcattcatgggttaatggattaatgggttatcacaggaatgggactggtggctttataagaagaggaaaagagaac |
| SEQ ID | tgagctagcatgcccagcccacagagagcctccactagagtgatgctaagtggaaatgtgaggtgcagctgccacagagggcc |
| NO: 378 | cccaccangggaaatgtctagtgtctagtggatccaggccacaggagagagtgccttgtggagcgctgggagcaggacctgac |
| | caccaccaggaccccagaactgtggagtcagtggcagcatgcagcgcccccttgggaaagctttaggcaccagcctgcaaccc |
| | attcgagcagccacgtaggctgcacccagcaaagccacaggcacggggctacctgangccttgggggcccaatccctgctcca |
| | gtgtgtccgtgaggcagcacacgaagtcaaaagagattattctcttcccacagataccttttctctcccatgaccctttaaca |
| | gcatctgcttcattcccctcaccttcccaggctgatctgaggtaaa |
| 200905_x_at | aaagcctgagacagctgccttgtgtgcgactgagatgcacagctgccttgtgtgcgactgagatgcaggatttcctcacgcct |
| SEQ ID | cccctatgtgtcttaggggactctggcttctctttttgcaagggcctctgaatctgtctgtgtccctgttagcacaatgtgag |
| NO: 379 | gaggtagagaaacagtccacctctgtgtctaccatgacccccttcctcacactgacctgtgttccttccctgttctcttttct |
| | attaaaaataagaacctgggcagagtgcggcagctcatgcctgtaatcccagcacttagggaggccgaggagggcagatcacg |
| | aggtcaggagatcgaaaccatcctggctaacacggtgaaaccccgtctctactaaaaaatacaaaaaattagctgggcgcaga |
| | ggcacgggcctgtagtcccagctactcaggaggcggaggcatggagaatggcgtcaacccgggaggcggaggttgcagtgagc |
| | caggattgtgcgactgcactccagcctgggtgacagggtgaaacgccatctc |
| 201009_s_at | atactgaggtggatccctgcatcctcaacaacaatgtgcagtgagcatgtggaagaaaagaagcagctttacctacttgtttc |
| SEQ ID | tttttgtctctcttcctggacactcactttttcagagactcaacagtctctgcaatggagtgtgggtccaccttagcctctga |
| NO: 380 | cttcctaatgtaggaggtggtcagcaggcaatctcctgggccttaaaggatgcggactcatcctcagccagcgcccatgttgt |
| | gatacaggggtgtttgttggatgggtttaaaaataactagaaaaactcaggcccatccattttctcagatctccttgaaaatt |
| | gaggccttttcgatagtttcgggtcaggtaaaaatggcctcctggcgtaagctttt |
| 201010_s_at | gtgttctcctactgcaaatattttcatatgggaggatggttttctcttcatgtaagtccttggaattgattctaaggtgatgt |
| SEQ ID | tcttagcactttaattcctgtcaaattttttgttctccccttctgccatcttaaatgtaagctgaaactggtctactgtgtct |
| NO: 381 | ctagggttaagccaaaagacaaaaaaaattttactacttttgagattgccccaatgtacagaattatataattctaacgctta |
| | aatcatgtgaaagggttgctgctgtcagccttgcccactgtgacttcaaacccaaggaggaactcttgatcaagatgcccaac |
| | cctgtgatcagaacctccaaatactgccatgagaaactagagggcaggtgttcataaaagccctttgaacccccttcctgccc |
| | tgtgttaggagatagggatattggcccctcactgcagctgccagcacttggtcagtcactctcagccatagcactttgttcac |
| | tgtcctgtgtcagagcactgagctccacccttttctgagagttat |
| 201891_s_at | tttataattctactttgagtgctgtctccatgtttgatgtatctgagcaggttgctccacaggtagctctaggagggctggca |
| SEQ ID | acttagaggtggggagcagagaattctcttatccaacatcaacatcttggtcagatttgaactcttcaatctcttgcactcaa |
| NO: 382 | agcttgttaagatagttaagcgtgcataagttaacttccaatttacatactctgcttagaatttgggggaaaatttagaaata |
| | taattgacaggattattggaaatttgttataatgaatgaaacattttgtcatataagattcatatttacttcttatacatttg |
| | ataaagtaaggcatggttgtggttaatctggttt |
| 202546_at | gatctggtgcggaacctgcaaagtgaggtggagggagttaagaatattatgacccagaatgtggagcggatcctggcccgggg |
| SEQ ID | ggaaaacttggaacatctccgcaacaagacagaggatctggaagccacatctgagcacttcaagacgacatcgcagaaggtgg |
| NO: 383 | ctcgaaaattctggtggaagaacgtgaagatgattgtccttatctgcgtgattgtttttatcatcatcctcttcattgtgctc |
| | tttgccactggtgccttctcttaaagtaa |
| 202688_at | ctctacctcatatcagtttgctagcagaaatctagaagactgtcagcttccaaacattaatgcaatggttaacatcttctgtc |
| SEQ ID | tttataatctactccttgtaaagactgtagaagaaagcgcaacaatccatctctcaagtagtgtatcacagtagtagcctcca |
| NO: 384 | ggtttccttaagggacaacatccttaagtcaaaagagagaagaggcaccactaaaagatcgcagtttgcctggtgcagtggc |
| 203915_at | gattatcaattaccacaccatctcccatgaagaaagggaacggtgaagtactaagcgctagaggaagcagccaagtcggttag |
| SEQ ID | tggaagcatgattggtgcccagttagcctctgcaggatgtggaaacctccttccaggggaggttcagtgaattgtgtaggaga |
| NO: 385 | ggttgtctgtggccagaatttaaacctatactcactttcccaaattgaatcactgctcacactgctgatgatttagagtgctg |
| | tccggtggagatcccacccgaacgtcttatctaatcatgaaactccctagttccttcatgtaacttccctgaaaaatctaagt |
| | gtttcataaatttgagagtctgtgacccacttacc |
| 204057_at | aattgtcggattttccatgtcctcctttctcctttgtgcccagcctgagtcagcaccatcccgcattcagaacctcccagtga |
| SEQ ID | aagggcagccttcattttgagaaggtggaaggtgttagggtttgggagacagctcatccaatctcccaagtctcatggtggat |
| NO: 386 | ttgtgactgtgagagtttccggtttaaaatctgaaaagccagatatgcctgtttccttttcccagcaccatgcctgtggaggg |
| | gacagtcagacccagaggtcctttacgtgtggatggagttcacaggcgaatagaggagaggaccaggggacgtggcttgtccc |
| | ttttgtccaacaaagcattatatttttaagaatggcagncctgtttgctgaagtgttcataagataacaataggcttgaatct |
| | ccaattc |
| 204078_at | aacttaagatggacacagctgactggacccccatcctgcctcacccatgggtgctgcaccccagacccatcctgccacttcta |
| SEQ ID | tgtctctggaccacaggatggtggtggcattgcaggttggcaagtgggctgatggggtccgccctcctcactgctgagctcct |
| NO: 387 | cacctggacagtctcctggacaaggagtttccagctgctggctggagtctcaggccaaattgcagagggtcctccagggtcct |
| | gaagagcactggactaagagtctagtggttccagggc |
| 204116_at | ttctggctggaacggacgatgccccgaattcccaccctgaagaacctagaggatcttgttactgaataccacgggaacttttc |
| SEQ ID | ggcctggagtggtgtgtctaagggactggctgagagtctgcagccagactacagtgaacgactctgcctcgtcagtgagattc |
| NO: 388 | ccccaaaaggaggggcccttggggaggggcctggggcctccccatgcaaccagcatagcccctactgggcccccccatgttac |
| | accctaaagcctgaaacctgaaccccaatcctctgacagaagaaccccagggtcctgtagccctaagtggtactaactttcct |
| | tcattcaacccacctgcgtctcatactcacctcaccccactgtggctgatttggaattttgtgcccccatgtaagcacc |
| 204233_s_at | gcaaacatccggaagtatcccaccaagaaacaacagctccattttatttccagttacttgcctgcattccaaaatgactttga |
| SEQ ID | aaacctcagtactgaagaaaaatccattataaaagaagaaatgttgcttgaagttaataggtttgcccttgcatctcatttcc |
| NO: 389 | tctggggactgtggtccattgtacaagccaagatttcatctattgaatttgggtacatggactacgcccaagcaaggtttgat |
| | gcctatttccaccagaagaggaagcttggggtgtgactgtggggaggactccatccacctcatcactggactgcatggggagg |
| | cagcagagcggggtcccctctgtgcttcgactactgctcctgtggcaggaggctttgggtggctcactactgaacaca |
| 204661_at | acagccacgaagatcctaccaaaatgaagcgcttcctcttcctcctactcaccatcagcctcctggttatggtacagatacaa |
| SEQ ID | actggactctcaggacaaaacgacaccagccaaaccagcagcccctcagcatccagcagcatgagcggaggcattttcctttt |
| NO: 390 | cttcgtggccaatgccataatccacctcttctgcttcagttgaggtgacacgtctcagccttagccctgtgccccctgaaaca |
| | gctgccaccatcactcgcaagagaatcccctccatctttgggaggggttgatgccagacatcaccaggttgtagaagttgaca |
| | ggcagtgccatgggggcaacagccaaaataggggggtaatgatgtaggggccaagc |
| 204724_s_at | caccagcaaggacggccaggacggtgctcccggcgagcctgggcctcccggagatcctgggcttccaggtgccattggggccc |
| SEQ ID | aggggacaccggggatctgcgacacctcagcctgccaaggagccgtgttaggaggggtcggggagaaatcaggctctcgaagc |
| NO: 391 | tcataaaattcaacgtgaggaagcaagtgacaaggacgcccgaagcacagtggacggtcatgaaggagcgggggtgtggcagg |
| | cgggtgacgtccaggagagggagcgcccctggctgcccctcggccgccgactggacgcgtgggccttgccagcgagcaccctc |
| | attgggctgtcgcctgacagcatacctcaaaaggccctagctaataaacctgtaagcccagcatttgagagaaggtagggtgt |
| | gtatatataaaaggttgtgtacaactccacgaggtgaaaaatattcagtaacttgtttgcatagcatttgtgtaaagactatg |
| | atctcatcccaata |
| 205159_at | gatttacaaaggtcctcccattgcaaagcagtgtttgtcctaatttatatattgtttttctagttcattttgtgtttccaact |
| SEQ ID | tttcatgtaaaattttaattatttttgaatgtgtggatgtgagactgaggtgccttttggtactgaaattctttttccatgta |
| NO: 392 | cctgaagtgttacttttgtgatataggaaatccttgtatatatactttattggtccctaggcttcctattttgttaccttgct |
| | ttctctatggcatccaccattttgattgttctacttttatgatatgttttcataagtggttaagcaagtattctcgttacttt |
| | tgctcttaaatccctattcattacagcaatgttggtggtcaaagaaaatgataaacaacttgaatgttcaatggtcctgaaat |
| | acataacaacattttagtacattgtaaagtagaatcctctgttcataatgaac |
| 205204_at | agatccgagtgcactcgcgaggcaacctctgggccaccggtcacttcatgggcaagaagagtctggagccttccagcccatcc |
| SEQ ID | cattggggacagctccccacacctcccctgagggaccagcgactgcagctgagtcatgatctgctcggaatcctcctgctaaa |
| NO: 393 | gaaggctctgggcgtgagcctcagccgccccgcaccccaaatccagtacaggaggctgctggtacaaatactgcagaaatgac |
| | accaataataggggcagacacaacagcgtggcttagattgtgcccacccagggaaggtgctgaatgggaccctgttgatggcc |
| | ccatctggatgtaaatcctgagctcaaatctctgttactccattactgtga |
| 205419_at | cagcccctgaagaaaattcacgtgaaatgacagaaacgcagatgatgatacattccaagtcttcaaatggaaagtgaaatgga |
| SEQ ID | ttgtattttggtttatagtgacgtaaactgtatgacaaactttgcaggacttcccttataaagcaaaataattgttcagcttc |
| NO: 394 | caattagtattcttttatatttctttcattgggcgctttcccatctccaactcggaagtaagcccaagagaacaacataaagc |
| | aaacaacataaagcacaataaaaatgcaaataaatattttcatttttatttgtaaacgaatacaccaaaaggaggcgctctta |
| | ataactcccaatgtaaaaagttttgttttaataaaaaattaattattattcttgccaacaaatggctagaaaggactgaatag |
| | attatatattgccagatgttaatactgtaacatactttttaaataacatatttcttaaatccaaatttctctcaatgttagat |
| | ttaattccctcaataacaccaa |
| 205668_at | ggaactctaaaccttgtgatgactactaacaaatgtaaaattatgagtgattaagaaaacattgctttgtggttatcacttta |
| SEQ ID | agttttgacacctagattatagtcttagtaatagcatccactggaaaaggtgaaaatgttttattcagcatttaacttacatt |
| NO: 395 | tgtactttagagtatttttgtataaaatccatagatttattttacatttagagtatttacactatgataaagttgtaaataat |
| | tttctaagacagtttttatatagtctacagttgtcctgatttcttattgaatttgttagactagttctcttgtcttgtgatct |
| | gtgtacaattttagtcactaagactttcctccaagaactaagccaacttgatgtgaaaagcacggctgtatataatggtgatg |
| | tca |
| 205696_s_at | ttcctgttctcttgtatagctgaaattccagtttaggagctcagttgagaaacagttccattcaactggaacatttttttttt |
| SEQ ID | tccttttaagaaagcttcttgtgatccttcggggcttctgtgaaaaacctgatgcagtgctccatccaaactcagaaggcttt |
| NO: 396 | gggatatgctgtattttaaagggacagtttgtaacttgggctgtaaagcaaactggggctgtgttttcgatgatgatgatcat |
| | catgatcatgatgattttaacagttttacttctggcctttcctagctagagaaggagttaatatttctaaggtaactcccata |
| | tctcctttaatgacattgatttctaatgatataaatttcagcctacattgatgccaagcttttttgccacaaagaagattctt |
| | accaagagtgggctttgtggaaacagctggtact |
| 205758_at | cagcccttgcattgcagaggggcccatgaaagaggacaggctacccctttacaaatagaatttgagcatcagtgaggttaaac |
| SEQ ID | taaggccctcttgaatctctgaatttgagatacaaacatgttcctgggatcactgatgactttttatactttgtaaagacaat |
| NO: 397 | tgttggagagcccctcacacagccctggcctcngctcaactagcagatacagggatgaggcagacctgactctcttaaggagg |
| | ctgagagcccaaactgctgtcccaaacatgcacttccttgcttaaggtatggtacaagcaatgcctgcccattggagagaaaa |
| | aacttaagtagataaggaaataagaaccactcataattcttcaccttaggaataatctcctgttaatatggtgtacattcttc |
| | ctgattattttctacacatac |
| 205890_s_at | gatcttaaagccacggagaagcctctcatcttatggcattgacaaagagaagaccatccaccttaccctgaaagtggtgaagc |
| SEQ ID | ccagtgatgaggagctgcccttgtttcttgtggagtcaggtgatgaggcaaagaggcacctcctccaggtgcgaaggtccagc |
| NO: 398 | tcagtggcacaagtgaaagcaatgatcgagactaagacgggtataatccctgagacccagattgtgacttgcaatggaaagag |
| | actggaagatgggaagatgatggcagattacggcatcagaaagggcaacttactcttcctggcatcttattgtattggagggt |
| | gaccaccctggggatggggtgttggcaggggtcaaaaagcttatttcttttaatctcttactcaacgaacacatcttctgatg |
| | atttcccaaaattaatgagaatgagatgagtagagtaagatttgggtgggatgggtaggatgaagtatattgcccaactctat |
| | gtttctttga |
| 206082_at | tgaaggatggtgactgcgccatggcctggatctgctgcagtgtcctttcctgtggaggctccactcaaagctggcatcctcct |
| SEQ ID | atgtcacctagagtgtgggtcaaagcaatacacctacatgtagaatgtgatgtcagaactcaaacaggctcaccaggcagtgt |
| NO: 399 | gcttcttccttgcatgaggatgcaagatgcaacagtttgtcttcacattggaaggacacccctggatgcccctaaccactaga |
| | cctgtaaaacttcactgcagtggccacttctgaatctctgtaaggtttatttatcttcacccctctggagagaagatgtttta |
| | ccaaagcctctagtgtaccgtcctcctcttactcatccatcccagtcaacatgatgttgtcaatgaaataaaggaatttaata |
| | ttctatagtatatccaggttctccagatctcttaagactgtactatagaggcctgggg |
| 206134_at | ctttctatattgttatcagtccaggaaacaggtaaacagatgtaattagagacattggctctttgtttaggcctaatctttct |
| SEQ ID | ttttacttttttttttcttttttctttttttttaaagatcatgaatttgtgacttagttctgccctttggagaacaaaagaaa |
| NO: 400 | gcagtcttccatcaaatcaccttaaaatgcacggctaaactattcagagttaacactccagaattgttaaattacaagtacta |
| | tgctttaatgcttctttcatcttactagtatggcctataaaaaaaataataccacttgatgggtgaaggctttggcaatagaa |
| | agaagaatagaattcaggttttatgttattcctctgtgttcacttcgccttgctcttgaaagtgcagtatttttctacatcat |
| | gtcgagaatgattcaatgtaaatatttttcattttatcatgtatatcctatacacacatctccttcatcatcatatatgaagt |
| | ttattttgagaagtctacattgcttacattt |
| 206540_at | ggatcaatgggtttaacttgggccggtactggacaaagcaggggccacaacagaccctctacgtgccaagattcctgctgttt |
| SEQ ID | cctaggggagccctcaacaaaattacattgctggaactagaagatgtacctctccagccccaagtccaatttttggataagcc |
| NO: 401 | tatcctcaatagcactagtactttgcacaggacacatatcaattccctttcagctgatacactgagtgcctctgaacca |
| 206574_s_at | gaaggatggcatcaccgttgtggactggccgtttgacgatggggcgcccccgcctggcaaggtagtggaagactggctgagcc |
| SEQ ID | tggtgaaggccaagttctgtgaggcccccggcagctgcgtggctgtgcactgcgtggcgggcctggggcgggctccagtcctt |
| NO: 402 | gtggcgctggcgcttattgagagcgggatgaagtacgaggacgccatccagttcatccgccagaagcgccgcggacgcatcaa |
| | cagcaagcagctcacctacctggagaaataccggcccaaacagaggctgcggttcaaagacccacacacgcacaagacccggt |
| | gctgcgttatgtagctcaggaccttggctgggcctggtcgtcatgtaggtcaggaccttggctggacctggaggccctgccag |
| | ccctgctctgcccagcccagcagggctccaggccttggctggccccacatcgccttttcctccccgacacctccgtgcacttg |
| | tgtccgaggag |
| 206666_at | aaacctctcttagatctggaaccaaatgcaaggttactggctggggagccaccgatccagattcattaagaccttctgacacc |
| SEQ ID | ctgcgagaagtcactgttactgtcctaagtcgaaaactttgcaacagccaaagttactacaacggcgacccttttatcaccaa |
| NO: 403 | agacatggtctgtgcaggagatgccaaaggccagaaggattcctgtaagggtgactcagggggccccttgatctgtaaaggtg |
| | tcttccacgctatagtctctggaggtcatgaatgtggtgttgccacaaagcctggaatctacaccctgttaaccaagaaatac |
| | cagacttggatcaaaagcaaccttgtcccgcctcatacaaattaagttacaaataattttattggatgcacttgcttcttttt |
| | tcctaatatgctcgcaggttagagttgggtgtaagtaaagcagagcacatatggggtccatttttgcacttgta |
| 207175_at | aaataacatacgcactcaacttccttttctttcttccttcctttctttcttccttcctttctttctctctctctctttccttc |
| SEQ ID | cttccttcctccttttctctctctctctctctctctctcttttcttgacagactctcgttctgtggccctggctggagttcag |
| NO: 404 | tggtgtgatcttggctcactgctacctctaccatgagcaattctcctgcctcagcctcccaagtagctggaactacaggctca |
| | tgccactgcgcccagctaatttttgtatttttcgtagagacggggtttcaccacattcgtcaggttggtttcaaactcctgac |
| | tttgtgatccacccgcctcggcctcccaaagtgctgggattacaggcatgagccatcacacctggtcaactttcttttgatta |
| | gtgtttttgtggtatatctttttccatcatgttactttaaatatatctatattattgtatttaaaatgtgtttcttacagact |
| | gcatgtagttgggtataatttttatccagtctaaaaatatctgtcttttaattggtgttt |
| 207651_at | ttgccttgtaattcgacagctctacagaaacaaagataatgaaaattacccaaatgtgaaaaaggctctcatcaacatacttt |
| SEQ ID | tagtgaccacgggctacatcatatgctttgttccttaccacattgtccgaatcccgtataccctcagccagacagaagtcata |
| NO: 405 | actgattgctcaaccaggatttcactcttcaaagccaaagaggctacactgctcctggctgtgtcgaacctgtgctttgatcc |
| | tatcctgtactatcacctctcaaaagcattccgctcaaaggtcactgagacttttgcctcacctaaagagaccaaggctcaga |
| | aagaaaaattaagatgtgaaaataatgcataaaagacaggattttttgtgctaccaattctggccttactgga |
| 208296_x_at | ttgagttctccttttaagtaccaatgatacttaaatttctcagaaatgtaatggtgtgtcattgccttgaaatgcttgcttag |
| SEQ ID | ggcttcttttatgttatcttaaaaagtgctggtgaattttccattttttacatccatttcacatgtaagagacacaaaagtct |
| NO: 406 | agattggtcttgatattgagataataaaaagtaagtagcattaagaaaggtaacaatcttcattctacagatgaactcattga |
| | aacaatttaggggaatgaggggcaaaaggggagaaatactgctaaagaacatgagcataaaaatgcgtgcgtttcagtgttta |
| | agaaggcttgataaagaatgtcacttttttatttaactgataagatttttgttattttttactttgataagtaaaccaaagaa |
| | tatttgtatttcaagcagtttgtgtggtgtttctatataattttctgtgtataaataataaagtaggcatttgtttattttgt |
| | aaaaaagaaatgaaaatctgctggccagctatgtcctctaggaaatgacagacccaaccacca |
| 209606_at | gaattgcaaaactgacatcccatttcacagcaatagtgacctttatttaaattgttgtgttatagtttatgcttcttaaatca |
| SEQ ID | tttttcaacctaaacagccaatttctaagcagacaggaaaactaaataataagttaattaatataacaaagatgcaggttcct |
| NO: 407 | gctcattccagtaatgtctttgaaagcaaaactaatatttattttctagattatccctgtgaataattgagaactttttggag |
| | tcaagtatgaataaaggtgtggcagaatataataatctggactattttctataggataattgctgggttataaaatcttaggt |
| | ttgcttatgcccagtagctcctgcggaggcttaataataggcaattttgaatttgttcaaacctgtaatggcttgtaaacaaa |
| | gatgaccatcagctgtttctcacatctatagtgacaataaagcgggaagtataagatttaataggaggggttaaggttcatga |
| | gaaccatggaaagatgtggtctgagatgggtgctgcaaagat |
| 209613_s_at | gcagatttcttgcttcatatgacaaagcctcaattactaattgtaaaaactgaactattcccagaatcatgttcaaaaaatct |
| SEQ ID | gtaatttttgctgatcgaaagtgcttcattgactaaacagtattagtttgtggctataaatgattatttagatgatgactgaa |
| NO: 408 | aatgtgtataaagtaattaaaagtaatatggtggctttaagtgtagagatgggatggcaaatgctgtgaatgcagaatgtaaa |
| | attggtaactaagaaatggcacaaacaccttaagcaatatattttcctagtagatatatatatacacatacatatatacacat |
| | atacaaatgtatatttttgcaaaattgttttcaatctagaacttttctattaactaccatgtcttaaaatcaagtctataatc |
| | ctagcattagtttaatattttgaatatgtaaacacctgtgttaatgctttgttaatgcttttcccactctcatttgttaatgc |
| | tttcccactctcgggaaggatttgcattttgagctttatctctaaatgtgacatgca |
| 209774_x_at | agagagacacagctgcagaggccacctggattgcgcctaatgtgtttgagcatcacttaggagaagtcttctatttatttatt |
| SEQ ID | tatttatttatttatttgtttgttttagaagattctatgttaatattttatgtgtaaaataaggttatgattgaatctacttg |
| NO: 409 | cacactctcccattatatttattgtttattttaggtcaaacccaagttagttcaatcctgattcatatttaatttgaagatag |
| | aaggtttgcagatattctctagtcatttgttaatatttcttcgtgatgacatatcacatgtcagccactgtgatagaggctga |
| | ggaatccaagaaaatggccagtaagatcaatgtgacggcagggaaatgtatgtgtgtctattttgtaactgtaaagatgaatg |
| | tcagttgttatttattgaaatgatttcacagtgtgtggtcaacatttctcatgttgaagctttaagaactaaaatgttctaaa |
| | tatcccttggacattttatgtctttcttgtaagatactgccttgtttaatgttaattatgcagtgtttccctc |
| 209795_at | tagtctaattgaatcccttaaactcagggagcatttataaatggcaaatgcttatgaaactaagatttgtaatatttctctct |
| SEQ ID | ttttagagaaatttgccaatttactttgttatttttccccaaaaagaatgggatgatcgtgtatttatttttttacttcctca |
| NO: 410 | gctgtagacaggtccttttcgatggtacatatttctttgcctttataatcttttatacagtgtcttacagagaaaagacataa |
| | gcaaagactatgaggaatatttgcaagacatagaatagtgttggaaaatgtgcaatatgtgatgtggcaaatctctattagga |
| | aatattctgtaatcttcagacctagaataatactagtcttataataggtttgtgactttcctaaatcaattctattacgtgca |
| | atacttcaatacttcat |
| 209894_at | ggcataggaacagttttctcttcatatattatgattatgaataataggaaagttgtattaattcagtatttgtcattatgcag |
| SEQ ID | tattttaatacctacataagtctattccattattatattttgcgcttggcatatttattcctttatgcttttaatcactaaca |
| NO: 411 | tattttacttaagagtataaaactatgctaaataaattgtattgtatatggaatatgcttgccattatgaagaacagctgggt |
| | ataccattatttcaagtaataaatctgaattctattagtttaaaaattgtaaaattcaagttaaatgacgtgtatgatatata |
| | agctgaacacattttctatagcccttaatttagttgtgttaatttttcaaggtgatgtatcaacagctttttttttttgcatt |
| | tgttttttcaatgtgtttacattgtatgaattgagctttttgcccacagattcttgatttgtagttgtttggcagga |
| 210260_s_at | gattgagtcatcgacattcaggatttaagtctgaggtagtcaaccctcaggaaaaaaaaaatggcttatctgaaatcagtact |
| SEQ ID | gtggaaatgaactatattagctattatgaataatgtccagtataagaatatgcttctggaattgagttctccttttaagtacc |
| NO: 412 | aatgatacttaaatttctcagaaatgtaatggtgtgtcattgccttgaaatgcttgcttagggcttcttttatgttatcttaa |
| | aaagtgctggtgaattttccattttttacatccatttcacatgtaagagacaaaaaagtctagattggtcttgatattgagat |
| | aataaaaagtaagtagcattaagaaaggtaacaatcttcattctacagatgaactcattgaaacaatttaggggaatgagggg |
| | caaaaggggagaaatactgctaaagaacatgagcataaaaacgcgtgcgtttcagtgtttaagaagg |
| 210538_s_at | gaaagtgtcctatttgtaggagtacaatcaagggtacagttcgtacatttctttcatgaagaagaaccaaaacatcatctaaa |
| SEQ ID | ctttagaattaatttattaaatgtattataactttaacttttatcctaatttggtttccttaaaatttttatttatttacaac |
| NO: 413 | tcaaaaaacattgttttgtgtaacatatttatatatgtatctaaaccatatgaacatatattttttagaaactaagagaatga |
| | taggcttttgttcttatgaacgaaaaagaggtagcactacaaacacaatattcaatcaaaatttcagcattattgaaattgta |
| | agtgaagtaaaacttaagatatttgagttaacctttaagaattttaaatattttggcattgtactaatacctggttttttttt |
| | tgttttgtttttttgtacagacagggcagcatactgagaccctgcctttaaaaacaaacagaacaaaaacaaaacaccaggga |
| | cacatttctctgtcttttttgatcagtgtcctatacatcgaaggtgtgcata |
| 210915_x_at | aaaggccacactggtgtgcctggccacaggtatcttccctgaccacgtggagctgagctggtgggtgaatgggaaggaggtgc |
| SEQ ID | acagtggggtcagcacggacccgcagcccctcaaggagcagcccgccctcaatgactccagatactgcctgagcagccgcctg |
| NO: 414 | agggtctcggccaccttctggcagaacccccgcaaccacttccgctgtcaagtccagttctacgggctctcggagaatgacga |
| | gtggacccaggatagggccaaacccgtcacccagatcgtcagcgccgaggcctggggtagagcagactgtggctttacctcgg |
| | tgtcctaccagcaaggggtcctgtctgccaccatcctctatgagatcctgctagggaaggccaccatgtatgctgtgctggtc |
| | agcgcccttgtgttgatggccatggtcaagagaaaggatttctgaaggcagccctggaagtggagttaggagcttctaacccg |
| | tcatggtttcaatacacattcttcttttgccagc |
| 210972_x_at | ggaacaagacttcaggtcacgctcgatatccagaaccctgaccctgccgtgtaccagctgagagactctaaatccagtgacaa |
| SEQ ID | gtctgtctgcctattcaccgattttgattctcaaacaaatgtgtcacaaagtaaggattctgatgtgtatatcacagacaaaa |
| NO: 415 | ctgtgctagacatgaggtctatggacttcaagagcaacagtgctgtggcctggagcaacaaatctgactttgcatgtgcaaac |
| | gccttcaacaacagcattattccagaagacaccttcttccccagcccagaaagttcctgtgatgtcaagctggtcgagaaaag |
| | ctttgaaacagatacgaacctaaactttcaaaacctgtcagtgattgggttccgaatcctcctcctgaaagtggccgggttta |
| | atctgctcatgacgctgcggctgtggtccagctgagatctgcaagattgtaagacagcctgtgctccct |
| 211603_s_at | ggtgctgccctgtgtacatataaatgaatctggtgttggggaaaccttcatctgaaacccacagatgtctctggggcagatcc |
| SEQ ID | ccactgtcctaccagttgccctagcccagactctgagctgctcaccggagtcattgggaaggaaaagtggagaaatggcaagt |
| NO: 416 | ctagagtctcagaaactcccctgggggtttcacctgggccctggaggaattcagctcagcttcttcctaggtccaagcccccc |
| | acaccttttccccaaccacagagaacaagagtttgttctgttctgggggacagagaaggcgcttcccaacttcatactggcag |
| | gagggtgaggaggttcactgagctccccagatctcccactgcggggagacagaagcctg |
| 211700_s_at | ccagcacgggcttcagtagtggacccagttctattgttggcttcagcggtggaccaagcactggtgttggcttctgcagtgga |
| SEQ ID | ccaagcaccagtggcttcagcggtggaccgagcacaggagctggcttcggcggtggaccaaacactggtgctggctttggtgg |
| NO: 417 | tggaccgagcaccagtgctggctttggcagtggagccgccagtcttggtgcctgtggcttctcgtatggctagtgagg |
| 211796_s_at | gccatcagaagcagagatctcccacacccaaaaggccacactggtgtgcctggccacaggtttctaccccgaccacgtggagc |
| SEQ ID | tgagctggtgggtgaatgggaaggaggtgcacagtggggtcagcacagacccgcagcccctcaaggagcagcccgccctcaat |
| NO: 418 | gactccagatactgcctgagcagccgcctgagggtctcggccaccttctggcagaacccccgcaaccacttccgctgtcaagt |
| | ccagttctacgggctctcggagaatgacgagtggacccaggatagggccaaacctgtcacccagatcgtcagcgccgaggcct |
| | ggggtagagcagactgtggcttcacctccgagtcttaccagcaaggggtcctgtctgccaccatcctctatgagatcttgcta |
| | gggaaggccaccttgtatgctgtgctggtcagtgccctcgtgctgatggccatggtcaagagaaagga |
| 212587_s_at | ggagccaatccatgcagatattttgttggaaacttataagaggaagattgctgatgaaggaagactttttctggctgaatttc |
| SEQ ID | agagcatcccgcgggtgttcagcaagtttcctataaaggaagctcgaaagccctttaaccagaataaaaaccgttatgttgac |
| NO: 419 | attcttccttatgattataaccgtgttgaactctctgagataaacggagatgcagggtcaaactacataaatgccagctatat |
| | tgatggtttcaaagaacccaggaaatacattgctgcacaaggtcccagggatgaaactgttgatgatttctggaggatgattt |
| | gggaacagaaagccacagttattgtcatggtcactcgatgtgaagaaggaaacaggaacaagtgtgcagaatactggccgtca |
| | atggaagagggcactcgggcttttggagatgt |
| 212588_at | tcctccttgttctactcatatatatctatcttatatagtttactattttacttctagagatagtacataaaggtggtatgtgt |
| SEQ ID | gtgtatgctactacaaaaaagttgttaactaaattaacattgggaaatcttatattccatatattagcatttagtccaatgtc |
| NO: 420 | tttttaagcttatttaattaaaaaatttccagtgagcttatcatgctgtctttacatggggttttcaattttgcatgctcgat |
| | tattccctgtacaatatttaaaatttattgcttgatacttttgacaacaaattaggttttgtacaattgaacttaaataaatg |
| | tcattaaaataaataaatgcaatatgtattaatattcattgtataaaaatagaagaatacaaacatatttgttaaatatttac |
| | atatgaaatttaatatagctatttttatggaatttttcattgatatgaaaaatatgatattgcatatgcatagttcccatgtt |
| 212592_at | gtatcaaaatcttccaattatcatgctcacctgaaagaggtatgctctcttaggaatacagtttctagcattaaacaaataaa |
| SEQ ID | caaggggagaaaataaaactcaaggagtgaaaatcaggaggtgtaataaaatgttcctcgcattcccccccgcnttttttttt |
| NO: 421 | ttttttgactttgccttggagagccagagcttccgcattttctttactattctttttaaaaaaagtttcactgtgtagagaac |
| | atatatgcataaacataggtcaattatatgtctccattagaaaaataataattggaaaacatgttctagaactagttacaaaa |
| | ataatttaaggtgaaatctctaatatttataaaagtagcaaaataaatgcataattaaaatatatttggacataacagactt |
| 212654_at | ggtggccgagagtaaatgtggggacctagaggaggagctgaaaattgttaccaacaacttgaaatccctggaggcccaggcgg |
| SEQ ID | acaagtattccaccaaagaagataaatatgaagaggagatcaaactgttggaggagaagctgaaggaggctgagacccgagca |
| NO: 422 | gagtttgccgagaggtctgtggcaaagttggagaaaaccatcgatgacctagaagatgaagtctatgcccagaagatgaagta |
| | caaggccattagcgaggaactggacaacgcactcaatgacatcacctccctctgagccccacgccagcgtggccacctcagct |
| | ctcttctctcctctcctttccattctctctatggggaggggagcaggcaggaggagcagaaattgccaacattgcacagccag |
| | gctgggagcagcctagggagagcccc |
| 212671_s_at | accaatgaggttcctgaggtcacagtgttttccaagtctcccgtgacactgggtcagcccaacaccctcatctgtcttgtgga |
| SEQ ID | caacatctttcctcctgtggtcaacatcacntggctgagcaatgggcactcagtcacagaaggtgtttctgagaccagcttcc |
| NO: 423 | tctccaagagtgatcattccttcttcaagatcagttacctcaccttcctcccttctgntgatgagatttatgactgcaaggtg |
| | gagcactggggcctggatgagcctcttctgaaacactgggagcctg |
| 212813_at | ggatgcttagcatgcaagttccctccatcattgccaccttggtagagagggatggctccccaccctcagcgttggggattcac |
| SEQ ID | gctccagcctccttcttggttgtcatagtgatagggtagccttattgccccctcttcttataccctaaaaccttctacactag |
| NO: 424 | tgccatgggaaccaggtctgaaaaagtagagagaagtgaaagtagagtctgggaagtagctgcctataactgagactagacgg |
| | aaaaggaatactcgtgtattttaagatatgaatgtgactcaagactcgaggccgatacgaggctgtgattctgcctttggatg |
| | gatgttgctgtacacagatgctacagacttgtactaacacaccgta |
| 213193_x_at | tgactccagatactgcctgagcagccgcctgagggtctcggccaccttctggcagaacccccgcaaccacttccgctgtcaag |
| SEQ ID | tccagttctacgggctctcggagaatgacgagtggacccaggatagggccaaacccgtcacccagatcgtcagcgccgaggcc |
| NO: 425 | tggggtagagcagactgtggctttacctcggtgtcctaccagcaaggggtcctgtctgccaccatcctctatgagatcctgct |
| | agggaaggccaccctgtatgctgtgctggtcagcncccttgtgttgatggccatggtcaagagaaaggatttctgaaggcagc |
| | cctggaagtggagttaggagcttctaacccgtcatggtttcaatacacattcttcttttgccagcgcttctgaagagctgctc |
| | tcacctctctgcatcccaatagatatccccctatgtgcatgcacacctgcacactcacggctgaaatctccctaacccagggg |
| | gaccttagcatgcctaagtga |
| 213539_at | gggaacactgctctcagacattacaagactggacctgggaaaacgcatcctggacccacgaggaatatataggtgtaatggga |
| SEQ ID | cagatatatacaaggacaaagaatctaccgtgcaagttcattatcgaatgtgccagagctgtgtggagctggatccagccacc |
| NO: 426 | gtggctggcatcattgtcactgatgtcattgccactctgctccttgctttgggagtcttctgctttgctggacatgagactgg |
| | aaggctgtctggggctgccgacacacaagctctgttgaggaatgaccaggtctatcagcccctccgagatcgagatgatgctc |
| | agtacagccaccttggaggaaactgggctcggaacaagtgaacctgagactggtggcttctagaagcagccattaccaactgt |
| | acct |
| 213790_at | gtttgagttttgtagggccatcacctggaaagtcaatgtgactagacacaaagtagcccagaggctacttttcttcctacagc |
| SEQ ID | ttattatagttgtaggttctatgacctcacttcatgggttccaggcaattccgctgaaaggtttgtctcctgaaattttttaa |
| NO: 427 | gtttgttttcctgacacatgtaatcagatgtgtagcaaccgagggaaacgaagcctaacattctccattgtggaaatacacac |
| | aggaggttacanttcacagcgtggatttttccagcttacacatgtgggatgacatcacagaaaccacaaaagcagcaaattaa |
| | actgtaggagagtcaatactcctgacgagtctcnggggggggcatttttatgccttcttaactttatgagaattctcaggctg |
| | aactataggccattgttccc |
| 214470_at | ggttcaccttggcatcaatttgccctgaaacttagctgtgctgggattattctccttgtcttggttgttactgggttgagtgt |
| SEQ ID | ttcagtgacatccttaatacagaaatcatcaatagaaaaatgcagtgtggacattcaacagagcaggaataaaacaacagaga |
| NO: 428 | gaccgggtctcttaaactgcccaatatattggcagcaactccgagagaaatgcttgttattttctcacactgtcaacccttgg |
| | aataacagtctagctgattgttccaccaaagaatccagcctgctgcttattcgagataaggatgaattgatacacacacagaa |
| | cctgatacgtgacaaagcaattctgttttggattggattaaatttttcattatcagaaaagaactggaagtgganaaacggct |
| | cttttttaaattctaatgacttagaaattagaggtgatgctaaagaaaacagctgtatttccatctcaca |
| 215313_x_at | tgagatgggagctgtcttcccagcccaccatccccatcgtgggcatcattgctggcctggttcnccttggagctgtgatcact |
| SEQ ID | ggagctgtggtcgctgccgtgatgtggaggaggaagagctcaggtggagaaggggtgaaagatagaaaaggagggagttacac |
| NO: 429 | tcaggctgcaagcagtgacagtgcccagggctctgatgtgtctctcacagcttgtaaagtgtgagacagctgccttgtgtggg |
| | actgagaggcaagagttgttcctgcccttccnnttgtgacttgaagaaccctgactttgtttctgcaaaggcncctgcatgtg |
| | tctgtgttcgtgtaggcataatgtgaggaggtggggagaccaccccaccccgatgtccaccatgaccctcttcccacgctgac |
| | ctgtgctccctctccaatcatctttcctgttccagagaggtggggctgaggtgtctccatctctgtctcaacttcatggtgca |
| | ctgagctgtaacttcttc |
| 216438_s_at | acagagacgcaagagaaaaatccactgccttccaaagaaacgattgaacaggagaagcaagcaggcgaatcgtaatgaggcgt |
| SEQ ID | gtgccgtcaatatgcactgtacattccacaagcattgccttcttattttacttcttttagctgtttaactctgtaagatgcaa |
| NO: 430 | agaggttggatcaagtttaaatgactgtgctgcccctttcacatcaaagaactactgacaacgaaggccgcgactgcctctcc |
| | catctgtctatctggctggcagggaaggaaagaacttgcatgttggtgaaggaagaagtggggtgggacaacagtgaaatcta |
| | aagtaaaaccaagctggcccaaggtgtcctgcaggctgtaatgcagtttaatcagagtg |
| 216920_s_at | cactactgctgcagctcacaaacacctctgcatattacatgtacctcctcctgctcctcaagagtgtggtctattttgccatc |
| SEQ ID | atcacctgctgtctgcttngaagaacggctttctgctgcaatggagagaaatcataacagacggtggcacaaggaggccatct |
| NO: 431 | tttcctcatcggttattgtccctagaagcgtcnncnnannnnnnnnttgggctttctttctgggtttgggccatttcagttct |
| | catgtgtgtactattctatctattgtataatggttttcaaaccagtgggcacacagagaacctcactctgtaataacaatgag |
| | gaatagccatggcgatctccagcaccaatctctccatgttttccacagctcctccagccaacccaaatagcgcctgctatagt |
| | gtagacagcctgcggcttctagccttgtccctctcttagtgttctttaatcagataactgcctggaagcctttcattttacac |
| | gccctgaagcagtcttctttgctagttgaattatgtggtgtgtttttccgtaata |
| 217767_at | ggtctacgcctattacaacctggaggaaagctgtacccggttctaccatccggaaaaggaggatggaaagctgaacaagctct |
| SEQ ID | gccgtgatgaactgtgccgctgtgctgaggagaattgcttcatacaaaagtcggatgacaaggtcaccctggaagaacggctg |
| NO: 432 | gacaaggcctgtgagccaggagtggactatgtgtacaagacccgactggtcaaggttcagctgtccaatgactttgacgagta |
| | catcatggccattgagcagaccatcaagtcaggctcggatgaggtgcaggttggacagcagcgcacgttcatcagccccatca |
| | agtgcagagaagccctgaagctggaggagaagaaacactacctcatgtggggtctctcctccgatttctggggagagaagccc |
| | aacctcagctacatcatcgggaaggacacttgggtggagcactggcctgaggaggacgaatgccaagacgaagagaaccagaa |
| | acaatgccaggacctcggcgccttcaccgagagcatggttgtc |
| 218499_at | aatgtttaattgtttggatctgcacagtttggtttttgcacaaaagtcatttaaaaaaatctgagtaattgtcaaatattaaa |
| SEQ ID | agaaagatattcttcctgtaaggaatacagtttttagtcaaagtggccattacatcctctttttaatttacataatacagata |
| NO: 433 | cttgagaaagttgttgtggtgttgtatgccaagaaaattctttttattggtgcctatattgtaacaattatttttaatgcatt |
| | gtattttgaagtaacggttcagttaaatttttcacctgctgtgtaactgaagcacaattacagtttataatcatctgtagaag |
| | tctggagataattttgcaactcatgttatgggttaaatgaatatttttgtaaaagtaaaagcaacaaatttataaattgatta |
| | tttgaaactttacaacacaattgcatcccaaatacaaattgtattgcttattcattatagctattcgtcctgtaatctgtttc |
| | taggtgaagcatactccagtgttttaggggttt |
| 218805_at | taaatctctggaccctggagcacttctaatgtatcaccccatggagtcattgttctaataatcaccaattcagactcagatcc |
| SEQ ID | tcgtggtctatggagcatgctgcttgctgtctgtgcagctcccatttccccttcttcctgatagacttggagctgtgtgcctc |
| NO: 434 | cactccaaggctgcctgcctgctgtaaacactattccactctgtctgccaacaactgcttcaggaatgggcctgagatcccat |
| | gcaggtccctgagaagtgagtaaaagtccgcagaggtggggatggaagatctctccttagatagaacctgtcttcctccctgg |
| | cattgtggggtctgggcgtgacactgggactctcagcagctttgtgctgccaacctgagattgaaggcagtgcctcagagcag |
| | cacagagagttggggccccctgagccctgagccaccagccctgcagcctgccctatctccgcatttccagttgtatta |
| 218807_at | tgccgtcagccgaactttgttatggagggagcagcctcacacaagcagaaacactcctgtggatggtattgtagcatgtattg |
| SEQ ID | tttattttagtcaatagaccctctccttataaatggtgtttagtcttcctgttgcatttcatgggcctgggggtttcctngca |
| NO: 435 | gaggatattggagcccctttttgtgacattaccaattacatctttgtccacgtttaatactttgttttggaaaatttaaatgc |
| | tgcagatttgtgtagagttctaataccaaagacagaagtaaatgttttccatatactttgtcttgcctgtatgcagcccttgt |
| | gtaatatggt |
| 222838_at | aacacctgtgctaggtcagtctggcacgtaagatgaacatccctaccaacacagagctcaccatctcttatacttaagtgaaa |
| SEQ ID | aacatggggaaggggaaaggggaatggctgcttttgatatgttccctgacacatatcttgaatggagacctccctaccaagtg |
| NO: 436 | atgaaagtgttgaaaaacttaataacaaatgcttgttgggcaagaatgggattgaggattatcttctctcagaaaggcattgt |
| | gaaggaattgagccagatctctctccctactgcaaaaccctattgtagta |
| 222943_at | gaagagaaaaccactaaccttgatttttgtattgcaaaatcagatagacctggaaacataaatttaaatccttagacattttt |
| SEQ ID | ctagaaaaaaatgcaaagtttataaagatgatacaaccatgatttgcaactgtaacaggagaccatttattataagcgtacct |
| NO: 437 | gtttgtgaacttaattattctgattccataagctgtttttgcttaggtgatccactgccatgtgatccataatttttctacat |
| | aaaaaatcaaagttaaaagtcacattatacagttatgcattcatttcaacaaaatagtgaattgataatctacttgttaatat |
| | attcggcccatattttgtgtgtttggacaagtacatctcccttttgcctaatgaactttt |
| 223403_s_at | cattaccaggttactcttgagatttttcaatggtgttagaactctcaaccaagacctgaaaaccaagtatgcaaggtttctga |
| SEQ ID | atctctctggtagattaactattgacaatgattttctgttatctttgttcaaaaagttcatgtcttctcaaaatatgaaatat |
| NO: 438 | tgataaatggaagagcatacggtgacaagtctcctttccaaccccaggttccctacaccctgctctcagcaggcagtgagtgt |
| | cacacacctgttaatccatcttgagcaggacagtactatacaaatagaatgcaagctgtaatgtaattttatattttcttata |
| | gccacgttgaagtaaaaacaaacaggtacagtgttttttaccagctttatagaagtacagttgttacatatttaatgaataca |
| | atttgatgggtctgactatatgcacacacctttgataccatcac |
| 223593_at | ggcagctgcagacaagtggttaactggtttggcagaatggcatgttcctgctgctggaatgtttttatggattaaagttaaag |
| SEQ ID | gcattaatgatgtaaaagaactgattgaagaaaaggccgttaagatgggggtattaatgctccctggaaatgctttctacgtc |
| NO: 439 | gatagctcagctcctagcccttacttgagagcatccttctcttcagcttctccagaacagatggatgtggccttccaggtatt |
| | agcacaacttataaaagaatctttatgaagaaattaaactaggttgggcatggtgcgtcacacctataatcccagcactttgg |
| | gaggcagaggagggaggatcacttgaacccaggaattcaggctgcagtaagctacgatcacaccactgcactctggcctgcat |
| | gcactctggcctgcatggcagaacaagaccctgtctctaaaaaaagagaaagaaatcaaactaatcatgctgctcat |
| 224896_s_at | ttccccaaaactcaactcctatggcaattatgaactccattttaccaagaacatttaagtgcctcagcatctgtatgatatag |
| SEQ ID | tggagcaggtgctgacataggtaccagctgacatgatgtgtcactagctctgtgggatgattgccacatacatggaacacctg |
| NO: 440 | ggagtgctggaaatgtactgggatcgaagtgacaaagtgtgttttcattcacagtggaggctacatcaagcaaggggaggtcc |
| | agccctcttgcaagtgtggtgagaggctctactagcaaagacatgggcaccggagtaggtcccgtgtagcatgcgggtgctgt |
| | agagaaaattcagtgacgtacatggctctggttctggacacaaaatctgtactg |
| 224908_s_at | accaagcctggctttatgtatttatttctgttcatgcggaatgattggttcagaactgttcctttcccttccatgatgtcctt |
| SEQ ID | gacacagaaggttatgcctggctcccagtcaggcttcatacttttggtccatgtaagtgctacccgttgctgggggaggagtc |
| NO: 441 | atggtttatttggaaatgtcagttgcaatcatggttctgtcatttgactgcacagtatcagaggagcctgttaacctctctgt |
| | gccttagtttcttagcccatgaaagagatcattgcctgacccagggactacctcaagggcttttgatgaggacaagtgacagt |
| | aggaagatgcaagagcctttagtaccaaggttctcaacactgactacatgctggaatgactgtgaagcttttaaaaaatgtta |
| | gtgcccactcttcccctgtacccccggacagttaaatcagaacctcagacagcaatatgccttgagatgccttgaaccatgct |
| | tgaga |
| 225502_at | gaagccttactacaattccaaaaatcatcatggttggaaatttgggaggagattatttgtgaacttgttacccttttggtaat |
| SEQ ID | ggtggactaattgctgtatagttatttttgttttattattactgttacattaatttaacatgcatttatagaagaatacattc |
| NO: 442 | aaagcactgatgtaggagatacacggtacttggagcagtcagccaaaaatcacagatactgctttcacttaaatggaaacaat |
| | tctccgataatgctttgctttttttcttatgtcactcttgtgtactatctatttttctcctctctgggaccaagtttcttttt |
| | ataaagcaataatatctctgttttcatttcagaacatt |
| 225882_at | gcaccttacatatttgatgctcaggaagaaagtgcaagaagatccctaatagaacattaaagattcttaaaagtttttgaagt |
| SEQ ID | aggctgcttggggtgaccagccccacccttacatctccatagttggtacagttagcttgtagcagctgaagctgatgcctgga |
| NO: 443 | gatcactgtctgttggtctgatctcagtatcatactgagacacctcccctgagccttacctacttaaattggtaaccgtccta |
| | ccaaaatttgtcaattttaatcaagtgaggcaagttgcaagggagccagagatacgtgaaaaaagaaaagcagaaatactgat |
| | actttctaagaaagaagttgtaataatttctttggcacattgacttactgatatcttttgaaatgcatagangactcttgtga |
| | accaaagagagcagtagtggttattccccggcgcaataaaaatgcc |
| 226218_at | ctaattggttctgcccaatctcctttcagattttattaggaaaaaaaaataaacctcctgatcggagacaatgtattaatcag |
| SEQ ID | aagtgtaaactgccagttctatatagcatgaaatgaaaagacagctaatttggtccaacaaacatgactgggtctagggcacc |
| NO: 444 | caggctgattcagctgatttcctaccagcctttgcctcttccttcaatgtggtttccatgggaatttgcttcagaaaagccaa |
| | gtatgggctgttcagaggtgcacacctgcattttctnagctcttctagaggggctaagagacttggtacgggccaggaagaat |
| | atgtggcagagctcctggaaatgatgcagattaggtggcatttttgtcagctctgtggtttattgttgggactattctttaaa |
| | atatccattgttcactacagtgaagatctctgatttnaccgtgtactatccacatgcattacaaacatttcgcagagctgct |
| 226219_at | gtctccgacacaaagcacttatctcttaggagattcccaagaaagtcaacaagatcttgttcccagggagtgggtcattggcc |
| SEQ ID | aaagggaacataaggtaggcagaaaacttaaaagagtttgttaaagtgaagactggagaaattcctcccttcctctgagctgt |
| NO: 445 | gaatctctcttcatgaaagccaaaggtagagacagggaggacagggccaggttagggccttccacacacaaacacttctagag |
| | ttgcccattcctgttatgttcttggaccctaagatacctcctgtcccttttaaatccagattaagagaaacgtccaggaagag |
| | ctctttgaagccctcaatatttgttggagggactggactcctctccagctccccaccctctgcctccagtcaccatgtgcaag |
| | agaggtcctgtacagatctctctgggctctcctttctcctttggaataacttgttcctatttcaggaaagggaaatggtgtca |
| | ctcaggccctgggactgcttctccagccaggctggggccacaggtcccactctagtgaaggt |
| 227265_at | acatctgctagaaccttttgccttaactattcaccaatatatgctaatattcataaatatggattgactgtttacaaacatta |
| SEQ ID | gaatcttgtcttggttccattttgatggctaatatttgttatcttaattaagactatttctgaggtcatgattacttgaaaat |
| NO: 446 | attgactaaaactgggtccttagaaattccaggtggagctgatttacctatgactgaggggaaaaaaaaatcaaattttactg |
| | ataatagtaatgctccaaatgaattaatgacacatctgttcaataaataaagagcttaaatatacaaaacataagaaatctgg |
| | gcaacaaaacttgtggtctttacttttgaatagctacccaagaaaaggttttaaaggtaaaagttatgagtaatgtcatcaca |
| | ataagctcttgtttaaaattcttttcttttatgtataattaggtttatgtttcatgtcttt |
| 227346_at | tgcttttggtgcgatggcactcactgtgaacatgtgtaaccacatattaatatgcaatattgtttccaatactttctaataca |
| SEQ ID | gttttttataatgttgngtgtggtgattgttcaggtcgaatctgttgtatccagtacagctttaggtcttcagctgcccttct |
| NO: 447 | ggcgagtacatgcacaggattgtaaatgagaaatgcagtcatatttccagtctgcctctatgatgatgttaaattattgctgt |
| | ttagctgtgaacaagggatgtaccactggaggaatagagtatccttttgtacacattttgaaatgcttcttctgtagtgatag |
| | aac |
| 227361_at | ttcccaggattctctttgggggtcattttgtgtgacagatatattttagacatttggagaaacagtttcagatcctgccagga |
| SEQ ID | tatttttgtaaaaaaggaaaatggaagattccaataaactagaaacagtacgtatctaagatgctgacacagaagctaatgtg |
| NO: 448 | acttttcagcttatcaagaggatggccaataaaacttaaaggtgtggttagatgttttctcacttttgtgacattaatttatc |
| | actgagtctcattcaaccaagtaatctaaaatactgtgcaaattctagcagtatgtcttcgataacttggatgttaggatagc |
| | caatatgtacaaaaaattaaatcaagtattttgtcctatgtataacacaaattaattttacacagagaaagatgtttctaggc |
| | aagtgaaattctggtaattcatactatttct |
| 227550_at | tgttgcatttttcactcttaacccgagggtgtgtttcagcttatgttcgttctgtttcatgcaggtttatagcacggtagagt |
| SEQ ID | agaaggcggcttctgatttttagggtatttttagaattcattcctgagtgaggggttcagacacccagtctcctcggaacagg |
| NO: 449 | ggtgaggggtcgactgagctttgttgagaagcctccagttaggcttcgggcgggtctccatgttatattgtgtgtttactgag |
| | cttcccactggtagaagatgacacatttgtccatcgtcctgtgtatctgctttccagaggacaccggagcattctcctggggt |
| | cactcccacatggctgcctcacatagctgttttgcaacagcctttattgccaacacccttggaagaacatctcctgtagaagt |
| | acaagttttgcaatatggactttggaagtggttttgtgatgttcgaattttctgttagcctattgctcaagcactacagaatg |
| | tacatagtccctttggcca |
| 228017_s_at | gcctgcgtaagtgaggaaacagctgatcctgctcctgtggcctccagcctcagcgaccgaccagtgacaatgacaggagctcc |
| SEQ ID | caggccttgggacgcgcccccacccagcaccccccaggcggccggcagcacctgccctgggttctaagtactggacaccagcc |
| NO: 450 | agggcggcagggcagtgccacggctggctgcagcgtcaagagagtttgtaa |
| 228071_at | aggagttggtggagctgatagagaaaatggtgcagtgcaacgaaggggcttacttttctgatgacatatacaaggacacagag |
| SEQ ID | gaaaggctgaaacaacgggaagaggttttgaggaaaatctacactgaccaattaaatgaagaaattaaactagtagaagagga |
| NO: 451 | taagcataaatcagaggaagaaaaggagaaagaaattaaattactaaaattaaaatatgatgaaaaaataaaaaatataaggg |
| | aagaagctgagagaaatatatttaaagatgtttttaataggatttggaagatgctttcagaaatatggcataggtttttgtcg |
| | aaatgtaagttttattcttcctaatttactgtgatttgttaatggatgaattgtattttgcaaagatagttagagaaatacct |
| | ccttcc |
| 228094_at | gggagaaacacatttactccccaataattgtacgggaggtgatcgaggaagaagaaccaagtgaaaaatcagaggccanctac |
| SEQ ID | atgaccatgcacccagtttggccttctctgaggtcagatcggaacaactcacttgaaaaaaagtcaggtgggggaatgccaaa |
| NO: 452 | aacacagcaagccttttgagaagaatggagagtcccttcatctcagcagcggtggagactctctcctgtgtgtgtcctgggcc |
| | actctaccagtgatttcagactcccgctctcccagctgtcctcctgtctcattgtttggtcaatacactgaagatggagaatt |
| | tggagcctggcagagagactggacagctctggaggaacaggcctgctgaggggaggggagcatggacttggcctctggagtgg |
| | gacactggccctgggaaccaggctgagctgagtggcctcaaaccccccgttggatcagaccctcctgtgggcagggttcttag |
| | tggat |
| 228786_at | cacacgcagatcctgcactgtactgtccagtcaactgacttcagcaaagatgtctgggttcagcagcgagttgctgtgtgagg |
| SEQ ID | ccaccagaatggaggtgatatcggcctcagtgctcatcctggaggtggagaagtggtcagagtcctctgtggtgaaatggccc |
| NO: 453 | tacaccaaagtgggagacattcagaatcgaggcgaaattggcctcagtgctcctcttggaggcagagaagcagtaggagtcgg |
| | tggtgaaatggccctgtgtgaatgtggaagaccagcagattggaggtggaattggcctcagtgcttgtcctggaggtggagaa |
| | gcggtcagagtccttggtggtgaagtggccctgcacaaaacgttgctcccccttggccggtgaaagaataaaagaaagctggc |
| | cncttgcatttcngtttcagttnanagaanacatgttttggaaatagtatcttctagatctgtctttttctcttctgatttaa |
| | cttagtaaagctaagttttatctcttc |
| 228812_at | gagacttcattggtgatacactcaatttttactgggtaattagctaataatgttggtcactgtctcacagttcaagtagcttt |
| SEQ ID | aagatgatgtggcaaggaaaacacaaagcttttgggtaaccagcgttcttaaatgtatggtttttgaccaggtgaacccttta |
| NO: 454 | gaagtgatttctgttttaaaagtatgtacttaaaatacctttggctgtgatgaatgtagatcccagcagaataccaaaatcct |
| | attttttttgactgagtatttgtagatgcttaatgactgaaatgaatttggaggcactgatgaaagtgatttttttnaagttc |
| | tcaggtactgttcaattat |
| 229152_at | tgaagaaagttctcctcctgatcacagccatcttggcagtggctgttggtttcccagtctctcaagaccaggaacgagaaaaa |
| SEQ ID | agaagtatcagtgacagcgatgaattagcttcagggttttttgtgttcccttacccatatccatttcgcccacttccaccaat |
| NO: 455 | tccatttccaagatttccatggtttagacgtaattttcctattccaatacctgaatctgcccctacaactccccttcctagcg |
| | aaaagtaaacaagaaggaaaagtcacgataaacctggtcacctgaaattgaaattgagccacttccttgaagaatcaaaattc |
| | ctgttaataaaagaaaaacaaatgtaattgaaatagcacacagcattctctagtcaatatctttagtgatcttctttaata |
| 229598_at | atttttcttagctaaatctggcaactgtgnctatttcattgaaaacctgaaagtgtacaaagaaggaagaagcagaatctgcc |
| SEQ ID | atatgagtaatagaagtgagcaggcccaggactccctaagtcaagaaaccaagaggcgtcattacggaaaagagtaactcacc |
| NO: 456 | ctgtgtgctccttggtagttctccctcagcgatgcccccatgttatgaatggggaaaagttcactgaagggttcatagtgaag |
| | aaactttttggatgatttctgttggtgggttttggataccttcaagggatcagaaaataatatacttaggaaattttggtaat |
| | gtcatcattactctctacattattattatgacggttacaattgttaaatctaggtggtgggtatgtgggttatattgtacatg |
| | atttttaacttgtctgcatgtttgaaa |
| 231229_at | gcacgtccaaggtgatcctgagggctgtggcggacnaaggggacctgcaagtatntgtccctgnncaccctgaagaaggctgt |
| SEQ ID | ttccaccacgggntacgacatggcccgaaatgcctatcacttcaagcgtgtgctcaaggggctggtggacaagggctcagcag |
| NO: 457 | gtgaccggcangggggcctcaggctccttcaccctgggcaagaagcaggcctccaagtccaagctcaaggtcaagaggcaacg |
| | acagcagaggtggcgctctgggcagcgcccctttggacagcacaggtcactactgggctccaaacaggggcacaagcggctta |
| | tcaagggggttcgaagggtggccaagtgccactgcaattaatgaggcaggccaggcaagcagtcaggggtgccaagancgcca |
| | ttggctcagtgcagtgggaa |
| 231929_at | ggctcaaataccatacctcagaaaatgaggtttactatggaaatactgaaacagtctttgcagctgtgtgacaagtcactcta |
| SEQ ID | ctacatactgatttggagacctccgctaaatagttttatcactgcagactaaaatgtgggacttgtatcttctttgtttttaa |
| NO: 458 | tgcacacacatacatgttctgtgcatgtatgtggttactgngtatatgtgtatgagtgttgtatatgcatgtgtgagtgtgtg |
| | tctgtatgtgtgtacaactaaagaagctgcagaaactttgtaatactttgtgaaaaggattatattataaaggtttgtactgt |
| | ctgagtgcacagctactggaataaatttagggaatctcaggaacaagcatanaannnntccaagatttatttcttctcagaag |
| | tgtaagtgcagtttttaattctgtat |
| 232311_at | acataccttgggttgatccacttaggaacctcagataataacatctgccacgtatagagcaattgctatgtcccaggcactct |
| SEQ ID | actagacacttcatacagtttagaaaatcagatgggtgtagatcaaggcaggagcaggaaccaaaaagaaaggcataaacata |
| NO: 459 | agaaaaaaaatggaaggggtggnaaacagagtacaataacatgagtaatttgatgggggctattatgaactgagaaatgaact |
| | ttgaaaagtatcttggggccaaatcatgtagactcttgagtgatgtgttaaggaatgctatgagtgctgagagggcatcagaa |
| | gtccttgagagcctcc |
| 232843_s_at | caagctaaaagagaacctcaggccaatgatcgagcggaaaattccagaactgtacaagccaatattcagagttgagagtcaaa |
| SEQ ID | agagaacattgtgctgtctgtcagcatatgtatatcagctacaaaatatattcaactttgacttcttttgacaaaggacttta |
| NO: 460 | ggaaaaagaggaacaaagacattatttgagaattaaattatatatttttaatatgactgtgaccttgactgataat |
| 235276_at | accctgcactcccaaagattttgtgcagatgggtagttccnttttttaaaaattgtgcagatatggaaaattgtgacttactt |
| SEQ ID | catgaccagaactatctagaatatgtgtgggggtataaacatcttgcttaaccaaatatctatgtaggcagaggtaaccagga |
| NO: 461 | gagaagcaagacttgctgcctaaaggagcccaccattttacttttcacatttaatctgccacgttgaatcaattggaataaaa |
| | cctgactcgcaggtgactggacaggaaatcccaaagttccaccatttctatgctta |
| 235391_at | atttcacggcaaagctttagaggtctacactgctgcctaccagaatatacaaaacattgatgaagatgaagatttagaggttt |
| SEQ ID | tccnaaattctctgtatgcaccagattattcatctcgtttagatattgtaagagcaaattcaaagtcacctcttcagagatca |
| NO: 462 | ctgtcagctaagtgtgtatctggaacaggacaggtatccacttgtcgactaagaaaggatcaacaagcagaagatgatgagga |
| | tgacgagttagatgttacagaagaagaaaattttcttaagtaaactacacatttccattttcatcataaatgacttgaaatcc |
| | acaatgactaaattgtagaactttatactcactttgctatgttaagcctcaaagtgaagtccaactgg |
| 235421_at | ataccttcacaatctgaactttctctagatgggcacagatcatgaataactcagaaaccattagcatattgtgtgcttaatta |
| SEQ ID | aggctggaaagtgctgaggctttttgcaggcgcagttagcaggcgaactggtcagcagggtttctggggaacgtagatttgcg |
| NO: 463 | tgacaggggccctgtgttgctaaggaattaatgcaggcactgagaaaagtctcagcgtcagacactcctccacctcccgggtc |
| | ctgcttccctccctctcccctttccaggcaactcacagtttaggggtgtggttgtgtgtgttcaagctcttgggttttacata |
| | taaatgcctgagacttttctgcagggtttaaaaactaacatcttgtcttacagctctttta |
| 235688_s_at | tgaggcagtgcatgttcttggcccagagtaagtgcttagtgaatgctttctaactccgaaccccagccacatccagggactgg |
| SEQ ID | gtgttgagcaaaaggggccttcaagatgttcaaggcacttggattttctcctgtctctcatcggcttttcttaacgggcctca |
| NO: 464 | gtgggtgcatgtgattatccacgtttcacctatgaaacatgaacagaggagactgacttatcagtgattcttccgcgggttcg |
| | gacagggcctcgattctgttttaaactccagtagtccctagaaattgtagctccctctagttgtggcaataggtgtgggtcct |
| | tgtgcttgcttttggcaagtttntgagctacacagggcctccattaccgtcactggtgaaatgcggctcacctccc |
| 236203_at | atgtcaggtttgtacctaccacatttaaaatagggacttgaagaattaaacattttattacaaatgaagcacttcatgcacag |
| SEQ ID | actggcacatagtaagtagtcgataggtgttaacaatttgtgttattgttattttctggagtccaactaacaaatcccacagt |
| NO: 465 | gaatgacatcacagggatgcaaccaacaagatccagaatatggaaacttctactagataaacaactccatttcttcagcaaca |
| | attcaagagagagagagaagagaagctatacattttaaaaggctgaagaaatatatgaaccaaatttgtatgaggcaatcaga |
| | aaaactgacaccgactgtattaaggaattatctaattttagtgtggtaatgagattgctgttatgttttctaa |
| 236627_at | aactagatttttgaccctcactcatctggctttccttgctatagacatgctttgcatacccagcttctagccacatcttccct |
| SEQ ID | aagaaaatttcancctggaatcagttccaaaagaaaatcttaagagatagagtatggatctgcatgttgtcagctacctaaag |
| NO: 466 | cagcaaaaattcctagatgagaataaaatcagggaaccttgcagtttaaggcacaccttaaatattaaatttttaatccttca |
| | atgcatccagccaaaacaagaaattgcaaatagctaccatccatcaatgcaaggttttt |
| 236681_at | gaaactcatgtgtcctcatggatcgtggatgccttcatttcttgagctctcaatgcagacatttaaatggctgcaatcagtag |
| SEQ ID | agtgacccgcggatggcataaatgcacctccttttcttggccttggatctatgggtctgggattgtggtcatctcctcaatcc |
| NO: 467 | tcaaaaagaggctgaatcaatgtggccgtgggtgggaacttacatacagaacccaatgaagaacttgactgtctaaacaaggg |
| | ggcctcgcatggagctgtaaagcatctaacaaatatgaaaaatgtgaagttccaaggtccaagaagaaaaataatgatgtttc |
| | tgaaagtgatgataaataattacttttaaagtgctgcatatttatacaattgagagattatttttgtaaatgcaatgtctgtg |
| | agctgggatacatgggcagtgcttcagac |
| 238834_at | gagagaatcctgcatctaacaattttaattttttnccctntatgctgttattccttacctagagaaacaatttccctccaaag |
| SEQ ID | ttcctttgaggggtctgtttaggccaggccaacacaagtgacctatgtggattttagcatcctttttttgaaatttgaggttt |
| NO: 468 | tatgaagcttgagtttttctggatatttttagtaatttgctggtgtgtacttagctcagatacttgattgcaactgtgttggg |
| | tcaactatttctaatgggacttttccatttgcatgtacagtcactggaaactgctgggcagagaaactctaaaaggtagttgg |
| | ggcacactttttccacctgtcagattggtgaagaattggtgaggctgtggggaaaatggcattctcccactt |
| 241671_x_at | attctgaagccagaccgtctttcctcacagcnnnnnngnnncnnnnccgngggcacgcaagcttcccctggttacctgagctg |
| SEQ ID | ctcctgccgtctcccgcntgggnttcgcngtggtgcacccgatcccggnatcgtgcgtntgcgccctgcgaaagaaggncctg |
| NO: 469 | ctggcggantccggncggggtctcctgnctcgcagctgggcgaggggacttggaggacagggtgaagctgcagaagacctggg |
| | gtgggatggntagagaggacgccaaggactggggaaggggaagttaggaataccttacatccaatgccca |
| 243010_at | gaaatacacccactctcttggaataatgacgtaccactcagttggaccctcaagagtcactgctttgtctgtgctggtagttt |
| SEQ ID | gtgagaagtgacccgcacgcttccatttgatgcatttgatgtgagtgaatccatacatttgaatgtcattgtccttgagaccc |
| NO: 470 | tacatgtgcagtttggctcatctcattaaagatgcttgatgtaataattggttagtttccttttattttcctgcaggcttttc |
| | catgagtattatttttttcaaagaacaaatctgtatggcttttccccatctccatattttgttttgctatgaattgctttgct |
| | ttggtgaacttgtcctagtatgcttgcctcacaaacgttttagccattgtgaattttcttcatctctgtaaatagttcatctg |
| | tgcttctccctgatgacgttttattttttttcccctgtaagcaaccgaggtagaaaaataaattgtttaccatggananannn |
| | nntgctgccgtctcttagcctgacagtgtcctgttctc |
| 244061_at | gaaatggcacattttctggatgtgagagttggtcaaaagatcacaaaaaaagtcaaaaaataattctactctgtgaatgaaaa |
| SEQ ID | atggatatttnngtacttaccctcataagcattaaaagaaaataatgcatgaaattccatagaaatgtgcctatcatgttata |
| NO: 471 | ctgactcaaaccagaagacctagagtatgatattgctaatataatacatgtggtgggtatgagtggaagtatgtgtgtgagat |
| | ttatcattgccatagtgtaaaagagttgaattagcttccacttgactagatgagagctcttagttcttatt |
| 244393_x_at | cccagccgctataacttttaacaattcccatatgtcctttattccactaagatgagtgcagtatatatttccatctgtccaag |
| SEQ ID | gcttcctaaatgtagccaangccaagccaacaccagtcacatgatcnaaatcaaagggcatttggggaatccaggctgtgatt |
| NO: 472 | cagggaagttccaagtgtctgatgaagtgtttgttttacatctttgtgtcccttgcaggtctagcactgtgctatgtaggtaa |
| | catgtgctcc |
| 34210_at SEQ | taatcggctcactataggaatttgcntcgaggccaagattcgnacgagnnngttcaaaagcagctaaaccaaaagaagcctcc |
| ID NO: 473 | agacagccctgagatcacctaaaaagctgctaccaagacagccacgaagatcctaccaaaatgaagcgcttcctcttcctcct |
| | actcaccatcagcctcctggttatggtacagatacaaactggactctcaggacaaaacgacaccagccaaaccagcagcccct |
| | cagcatccagcagcatgagcggaggcattttccttttcttcgtggccaatgccataatccacctcttctgcttcagttgaggt |
| | gacacgtctcagccttagccctgtgccccctgaaacannnnnnnnnnnnnnnnnnnagagaatcccctccatctttgggaggg |
| | gttgatgccagacatcaccaggttgtagaagttgacaggcagtgccatggggncaacagccaaaataggggggtaatgatgta |
| | ggggccaagcagtgcccagctgggggtcaataaagttacccttgtacttg |

TABLE 13
34 PS gene list, target sequences

| | |
|---|---|
| 1552584_at | actgtggccgacctactatttttattatttttgagctnggttctcagtctgttggcagactggagtgcaatcatggctcactg |
| SEQ ID | cagccttgaactcccagactcaagtgatccttccacctcagcctctggagtagctgggactacagacatgcaccaccacacct |
| NO: 474 | ggttaattttttatttttattttttgtngagacaggtgtctcnctacgttgcccaggctggtctcgaactcctgggctcaagt |
| | gatccacccatctccacctcccaaagtgctaggattacaggcgtgagccaccgtacccagcctggtcccatatcatagtgaaatggtgc |
| | ctgtaaagctctcagcattggcttggcacatgcagttggtactcaataaacggctgttgctatcccc |
| 1558972_s_at | ttctaagacccacatttggttattgaaggccacagcgaatcttaacctaacagccttgacaaactgcaccataggtgttttta |
| SEQ ID | gactcatataatttgttatttttcaaacaatagtgaataattaatattnttgtttggaatttgagnacaattaaatttgtact |
| NO: 475 | tttagtaactaccattctttgattagaaaattaagagaatgcatatcttactttggttgtaaattatcaagggctttctaata |
| | gaaatcatatataacatttctaaatataagtcctttcacatactgtgtttccagttgtcttgatattgaaaagtgtaataaacttcatg |
| | ctcacctat |
| 1559584_a_at | attcctgggctcgagagagccactcatccccatctctcagagtgttgggattacagccatgagccaccatgcccggccaaact |
| SEQ ID | tcagccttgaatattagtgattttgccatattagtttaccatctgtacaattatttgctttatntttttctttaaattggctc |
| NO: 476 | attattcacttaatgaaattattgcaacaggaatcttttgtatcacttctgtaaatggaaaaccagtctcatttgccatcaat |
| | agaaggt |
| 1563473_at | gaaaattcctggcagtttcaactgtgatagacattgctaacctgttctccaaagaggctgaaccaatttctgtttcctcaaca |
| SEQ ID | gtgtatgactgtttcccccatctattctccagcactgaggattaagtaactttcatttttgtcagtctgacagatataaagca |
| NO: 477 | gaacatttctgcataaggttctacagtaatttttagattttatgaccctttggattatgcctacataatgatgatcaaatatt |
| | cagaaactacattgtacctggccttaggcttggaattggatacaaaattaaatgaaaccagcttttgccctcaggttgatccc |
| | atctcctggagttggcagacaaatgaacaaataaaatgagagcaaaactgtatggttcacattgtgctagagaaatgcataag |
| | cttagctaacttttgtttgataaactctatattcattaatatcacaaatgaattcataaaataccgtatgcattatgtcccag |
| | gg |
| 203915_at | gattatcaattaccacaccatctcccatgaagaaagggaacggtgaagtactaagcgctagaggaagcagccaagtcggttag |
| SEQ ID | tggaagcatgattggtgcccagttagcctctgcaggatgtggaaacctccttccaggggaggttcagtgaattgtgtaggaga |
| NO: 478 | ggttgtctgtggccagaatttaaacctatactcactttcccaaattgaatcactgctcacactgctgatgatttagagtgctg |
| | tccggtggagatcccacccgaacgtcttatctaatcatgaaactccctagttccttcatgtaacttccctgaaaaatctaagt |
| | gtttcataaatttgagagtctgtgacccacttacc |
| 204116_at | ttctggctggaacggacgatgccccgaattcccaccctgaagaacctagaggatcttgttactgaataccacgggaacttttc |
| SEQ ID | ggcctggagtggtgtgtctaagggactggctgagagtctgcagccagactacagtgaacgactctgcctcgtcagtgagattc |
| NO: 479 | ccccaaaaggaggggcccttggggaggggcctggggcctccccatgcaaccagcatagcccctactgggcccccccatgttac |
| | accctaaagcctgaaacctgaaccccaatcctctgacagaagaaccccagggtcctgtagccctaagtggtactaactttcct |
| | tcattcaacccacctgcgtctcatactcacctcaccccactgtggctgatttggaattttgtgcccccatgtaagcacc |
| 204533_at | taactctaccctggcactataatgtaagctctactgaggtgctatgttcttagtggatgttctgaccctgcttcaaatatttc |
| SEQ ID | cctcacctttcccatcttccaagggtactaaggaatctttctgctttggggtttatcagaattctcagaatctcaaataacta |
| NO: 480 | aaaggtatgcaatcaaatctgctttttaaagaatgctctttacttcatggacttccactgccatcctcccaaggggcccaaat |
| | tctttcagtggctacctacatacaattccaaacacatacaggaaggtagaaatatctgaaaatgtatgtgtaagtattcttat |
| | ttaatgaaagactgtacaaagtataagtcttagatgtatatatttcctatattgttttcagtgtacatggaataacatgtaat |
| | taagtactatgtatcaatgagtaacaggaaaattttaaaaatacagatagatatatgctctgcatgttacataagataaatgt |
| | gctgaatggttttcaaataaaaatgaggtactctcctggaaatatt |
| 205242_at | ggagtttgcattcttattcatcagggaggaaagtttctttgaaaatagttattcagttataagtaatacaggattattttgat |
| SEQ ID | tatatacttgttgtttaatgtttaaaatttcttagaaaacaatggaatgagaatttaagcctcaaatttgaacatgtggcttg |
| NO: 481 | aattaagaagaaaattatggcatatattaaaagcaggcttctatgaaagactcaaaaagctgcctgggaggcagatggaactt |
| | gagcctgtcaagaggcaaaggaatccatgtagtagatatcctctgcttaaaaactcactacggaggagaattaagtcctactt |
| | ttaaagaatttctttataaaatttactgtctaagattaatagcattcgaagatccccagacttcatagaatactcagggaaag |
| | catttaaagggtgatgtacacatgtatcctttcacacatttgccttgacaaacttctttcactcacatctttttcactgactt |
| | tttttgtgggggcggggccggggggactctggtatctaattcttta |
| 205488_at | cagccacacgcgaaggtgaccttaaacttttacagctgacggaaaaagcaaaaattaacaaatatgtgactatccttcatcta |
| SEQ ID | cctaaaaagggggatgatgtgaaaccaggaaccatgtgccaagttgcagggtgggggaggactcacaatagtgcatcttggtc |
| NO: 482 | cgatactctgagagaagtcaatatcaccatcatagacagaaaagtctgcaatgatcgaaatcactataattttaaccctgtga |
| | ttggaatgaatatggtttgtgctggaagcctccgaggtggaagagactcgtgcaatggagattctggaagccctttgttgtgc |
| | gagggtgttttccgaggggtcacttcctttggccttgaaaataaatgcggagaccctcgtgggcctggtgtctatattcttct |
| | ctcaaagaaacacctcaactgga |
| 205758_at | cagcccttgcattgcagaggggcccatgaaagaggacaggctacccctttacaaatagaatttgagcatcagtgaggttaaac |
| SEQ ID | taaggccctcttgaatctctgaatttgagatacaaacatgttcctgggatcactgatgactttttatactttgtaaagacaat |
| NO: 483 | tgttggagagcccctcacacagccctggcctcngctcaactagcagatacagggatgaggcagacctgactctcttaaggagg |
| | ctgagagcccaaactgctgtcccaaacatgcacttccttgcttaaggtatggtacaagcaatgcctgcccattggagagaaaa |
| | aacttaagtagataaggaaataagaaccactcataattcttcaccttaggaataatctcctgttaatatggtgtacattcttc |
| | ctgattattttctacacatac |
| 205890_s_at | gatcttaaagccacggagaagcctctcatcttatggcattgacaaagagaagaccatccaccttaccctgaaagtggtgaagc |
| SEQ ID | ccagtgatgaggagctgcccttgtttcttgtggagtcaggtgatgaggcaaagaggcacctcctccaggtgcgaaggtccagc |
| NO: 484 | tcagtggcacaagtgaaagcaatgatcgagactaagacgggtataatccctgagacccagattgtgacttgcaatggaaagag |
| | actggaagatgggaagatgatggcagattacggcatcagaaagggcaacttactcttcctggcatcttattgtattggagggt |
| | gaccaccctggggatggggtgttggcaggggtcaaaaagcttatttcttttaatctcttactcaacgaacacatcttctgatg |
| | atttcccaaaattaatgagaatgagatgagtagagtaagatttgggtgggatgggtaggatgaagtatattgcccaactctat |
| | gtttctttga |
| 206134_at | ctttctatattgttatcagtccaggaaacaggtaaacagatgtaattagagacattggctctttgtttaggcctaatctttct |
| SEQ ID | ttttacttttttttttcttttttctttttttttaaagatcatgaatttgtgacttagttctgccctttggagaacaaaagaaa |
| NO: 485 | gcagtcttccatcaaatcaccttaaaatgcacggctaaactattcagagttaacactccagaattgttaaattacaagtacta |
| | tgctttaatgcttctttcatcttactagtatggcctataaaaaaaataataccacttgatgggtgaaggctttggcaatagaa |
| | agaagaatagaattcaggttttatgttattcctctgtgttcacttcgccttgctcttgaaagtgcagtatttttctacatcat |
| | gtcgagaatgattcaatgtaaatatttttcattttatcatgtatatcctatacacacatctccttcatcatcatatatgaagt |
| | ttattttgagaagtctacattgcttacattt |
| 206666_at | aaacctctcttagatctggaaccaaatgcaaggttactggctggggagccaccgatccagattcattaagaccttctgacacc |
| SEQ ID | ctgcgagaagtcactgttactgtcctaagtcgaaaactttgcaacagccaaagttactacaacggcgacccttttatcaccaa |
| NO: 486 | agacatggtctgtgcaggagatgccaaaggccagaaggattcctgtaagggtgactcagggggccccttgatctgtaaaggtg |
| | tcttccacgctatagtctctggaggtcatgaatgtggtgttgccacaaagcctggaatctacaccctgttaaccaagaaatac |
| | cagacttggatcaaaagcaaccttgtcccgcctcatacaaattaagttacaaataattttattggatgcacttgcttcttttt |
| | tcctaatatgctcgcaggttagagttgggtgtaagtaaagcagagcacatatggggtccatttttgcacttgta |
| 207651_at | ttgccttgtaattcgacagctctacagaaacaaagataatgaaaattacccaaatgtgaaaaaggctctcatcaacatacttt |
| SEQ ID | tagtgaccacgggctacatcatatgctttgttccttaccacattgtccgaatcccgtataccctcagccagacagaagtcata |
| NO: 487 | actgattgctcaaccaggatttcactcttcaaagccaaagaggctacactgctcctggctgtgtcgaacctgtgctttgatcc |
| | tatcctgtactatcacctctcaaaagcattccgctcaaaggtcactgagacttttgcctcacctaaagagaccaaggctcaga |
| | aagaaaaattaagatgtgaaaataatgcataaaagacaggattttttgtgctaccaattctggccttactgga |
| 209606_at | gaattgcaaaactgacatcccatttcacagcaatagtgacctttatttaaattgttgtgttatagtttatgcttcttaaatca |
| SEQ ID | tttttcaacctaaacagccaatttctaagcagacaggaaaactaaataataagttaattaatataacaaagatgcaggttcct |
| NO: 488 | gctcattccagtaatgtctttgaaagcaaaactaatatttattttctagattatccctgtgaataattgagaactttttggag |
| | tcaagtatgaataaaggtgtggcagaatataataatctggactattttctataggataattgctgggttataaaatcttaggt |
| | ttgcttatgcccagtagctcctgcggaggcttaataataggcaattttgaatttgttcaaacctgtaatggcttgtaaacaaa |
| | gatgaccatcagctgtttctcacatctatagtgacaataaagcgggaagtataagatttaataggaggggttaaggttcatga |
| | gaaccatggaaagatgtggtctgagatgggtgctgcaaagat |
| 209795_at | tagtctaattgaatcccttaaactcagggagcatttataaatggcaaatgcttatgaaactaagatttgtaatatttctctct |
| SEQ ID | ttttagagaaatttgccaatttactttgttatttttccccaaaaagaatgggatgatcgtgtatttatttttttacttcctca |
| NO: 489 | gctgtagacaggtccttttcgatggtacatatttctttgcctttataatcttttatacagtgtcttacagagaaaagacataa |
| | gcaaagactatgaggaatatttgcaagacatagaatagtgttggaaaatgtgcaatatgtgatgtggcaaatctctattagga |
| | aatattctgtaatcttcagacctagaataatactagtcttataataggtttgtgactttcctaaatcaattctattacgtgca |
| | atacttcaatacttcat |
| 210915_x_at | aaaggccacactggtgtgcctggccacaggtatcttccctgaccacgtggagctgagctggtgggtgaatgggaaggaggtgc |
| SEQ ID | acagtggggtcagcacggacccgcagcccctcaaggagcagcccgccctcaatgactccagatactgcctgagcagccgcctg |
| NO: 490 | agggtctcggccaccttctggcagaacccccgcaaccacttccgctgtcaagtccagttctacgggctctcggagaatgacga |
| | gtggacccaggatagggccaaacccgtcacccagatcgtcagcgccgaggcctggggtagagcagactgtggctttacctcgg |
| | tgtcctaccagcaaggggtcctgtctgccaccatcctctatgagatcctgctagggaaggccaccatgtatgctgtgctggtc |
| | agcgcccttgtgttgatggccatggtcaagagaaaggatttctgaaggcagccctggaagtggagttaggagcttctaacccg |
| | tcatggtttcaatacacattcttcttttgccagc |
| 210972_x_at | ggaacaagacttcaggtcacgctcgatatccagaaccctgaccctgccgtgtaccagctgagagactctaaatccagtgacaa |
| SEQ ID | gtctgtctgcctattcaccgattttgattctcaaacaaatgtgtcacaaagtaaggattctgatgtgtatatcacagacaaaa |
| NO: 491 | ctgtgctagacatgaggtctatggacttcaagagcaacagtgctgtggcctggagcaacaaatctgactttgcatgtgcaaac |
| | gccttcaacaacagcattattccagaagacaccttcttccccagcccagaaagttcctgtgatgtcaagctggtcgagaaaag |
| | ctttgaaacagatacgaacctaaactttcaaaacctgtcagtgattgggttccgaatcctcctcctgaaagtggccgggttta |
| | atctgctcatgacgctgcggctgtggtccagctgagatctgcaagattgtaagacagcctgtgctccct |
| 211796_s_at | gccatcagaagcagagatctcccacacccaaaaggccacactggtgtgcctggccacaggtttctaccccgaccacgtggagc |
| SEQ ID | tgagctggtgggtgaatgggaaggaggtgcacagtggggtcagcacagacccgcagcccctcaaggagcagcccgccctcaat |
| NO: 492 | gactccagatactgcctgagcagccgcctgagggtctcggccaccttctggcagaacccccgcaaccacttccgctgtcaagt |
| | ccagttctacgggctctcggagaatgacgagtggacccaggatagggccaaacctgtcacccagatcgtcagcgccgaggcct |
| | ggggtagagcagactgtggcttcacctccgagtcttaccagcaaggggtcctgtctgccaccatcctctatgagatcttgcta |
| | gggaaggccaccttgtatgctgtgctggtcagtgccctcgtgctgatggccatggtcaagagaaagga |
| 212592_at | gtatcaaaatcttccaattatcatgctcacctgaaagaggtatgctctcttaggaatacagtttctagcattaaacaaataaa |
| SEQ ID | caaggggagaaaataaaactcaaggagtgaaaatcaggaggtgtaataaaatgttcctcgcattcccccccgcnttttttttt |
| NO: 493 | ttttttgactttgccttggagagccagagcttccgcattttctttactattctttttaaaaaaagtttcactgtgtagagaac |
| | atatatgcataaacataggtcaattatatgtctccattagaaaaataataattggaaaacatgttctagaactagttacaaaa |
| | ataatttaaggtgaaatctctaatatttataaaagtagcaaaataaatgcataattaaaatatatttggacataacagactt |
| 212999_x_at | cactgcagaatgaaggaacatcccttgaggtgacccagccaacctgtggccagaaggaggnttgtaccttgaaaagacactga |
| SEQ ID | aagcattttggngtgtnaagtaagggtgggcagaggaggtagaaaatcaattcaattgtcgcatcattcatggttctttaata |
| NO: 494 | ttgatgctcagtgcantggcctnagaatatcccagcctctcttctggtttgntgagtgctntntaagtaagcatggtngaatt |
| | gtttggggncanatatagtganccttggtcactggtgtttcaaacattctggnaagtcacatcnatcaagaatantttttant |
| | tttaagaaagcataaccagcaataaa |
| 213193_x_at | tgactccagatactgcctgagcagccgcctgagggtctcggccaccttctggcagaacccccgcaaccacttccgctgtcaag |
| SEQ ID | tccagttctacgggctctcggagaatgacgagtggacccaggatagggccaaacccgtcacccagatcgtcagcgccgaggcc |
| NO: 495 | tggggtagagcagactgtggctttacctcggtgtcctaccagcaaggggtcctgtctgccaccatcctctatgagatcctgct |
| | agggaaggccaccctgtatgctgtgctggtcagcncccttgtgttgatggccatggtcaagagaaaggatttctgaaggcagc |
| | cctggaagtggagttaggagcttctaacccgtcatggtttcaatacacattcttcttttgccagcgcttctgaagagctgctc |
| | tcacctctctgcatcccaatagatatccccctatgtgcatgcacacctgcacactcacggctgaaatctccctaacccagggg |
| | gaccttagcatgcctaagtga |
| 213539_at | gggaacactgctctcagacattacaagactggacctgggaaaacgcatcctggacccacgaggaatatataggtgtaatggga |
| SEQ ID | cagatatatacaaggacaaagaatctaccgtgcaagttcattatcgaatgtgccagagctgtgtggagctggatccagccacc |
| NO: 496 | gtggctggcatcattgtcactgatgtcattgccactctgctccttgctttgggagtcttctgctttgctggacatgagactgg |
| | aaggctgtctggggctgccgacacacaagctctgttgaggaatgaccaggtctatcagcccctccgagatcgagatgatgctc |
| | agtacagccaccttggaggaaactgggctcggaacaagtgaacctgagactggtggcttctagaagcagccattaccaactgt |
| | acct |
| 214617_at | ccaacgcaaattcgcaaactttcttaaaacattatgagttncnntttgctatttttttttttttttttagctcatcggctatc |
| SEQ ID | gttagtgctagtggattttacatgtggcccnnnannnnnnnncnnncaacgtggcccagagaagccaaaagattggatacgca |
| NO: 497 | tcagacagatggaaaagggagattcagactgtttttcagggaggtggctgggtttacacgctaatcccgattcaccctgtcca |
| | aactgcctaagccctccgccattntcaagccctgcagtcacagctacacagatcacagcttcagccaggagctgggcagaagg |
| | ccaanaggctgttcccaccaggctgctcagggntggtcttttaggacccttcccttgagccctntatggtgtggcaaagcctt |
| | cattgccttaactggagccccatcagctccagctgctctgtnttntttgcccncaatgctttgcccctgagacaaatggaggc |
| | ctgtcctgacctgtctcaccatgtacatagctt |
| 216920_s_at | cactactgctgcagctcacaaacacctctgcatattacatgtacctcctcctgctcctcaagagtgtggtctattttgccatc |
| SEQ ID | atcacctgctgtctgcttngaagaacggctttctgctgcaatggagagaaatcataacagacggtggcacaaggaggccatct |
| NO: 498 | tttcctcatcggttattgtccctagaagcgtcnncnnannnnnnnnttgggctttctttctgggtttgggccatttcagttct |
| | catgtgtgtactattctatctattgtataatggttttcaaaccagtgggcacacagagaacctcactctgtaataacaatgag |
| | gaatagccatggcgatctccagcaccaatctctccatgttttccacagctcctccagccaacccaaatagcgcctgctatagt |
| | gtagacagcctgcggcttctagccttgtccctctcttagtgttctttaatcagataactgcctggaagcctttcattttacac |
| | gccctgaagcagtcttctttgctagttgaattatgtggtgtgtttttccgtaata |
| 217147_s_at | tctcctttctcaccaatgggcaatagcccataattgaaataaatttctgattgaaaggtataggaaacattaaaatgcattac |
| SEQ ID | taagagaagtaatataattttcttacaaagtatttttcccaaagatagctttactatttcaaaaattgtcaaattaatgcatg |
| NO: 499 | ctccttacaacaaacaaatatcaaaaagagtttaggaattctactagccagagatagtcacttggagaaactttctatatatc |
| | cttctaaatatttttctgggcatgctcatgtatgtacatcagttgtttctttttattttgaaccaaaaatgtggtttcttttg |
| | tacacattacttaaactttctttccagtcaacaatatattgtggatttattttcactgttatatttaactatatataaatacg |
| | catatattgtaattttaatgtctgcttagcaccccactgataaccaaatcacag |
| 222838_at | aacacctgtgctaggtcagtctggcacgtaagatgaacatccctaccaacacagagctcaccatctcttatacttaagtgaaa |
| SEQ ID | aacatggggaaggggaaaggggaatggctgcttttgatatgttccctgacacatatcttgaatggagacctccctaccaagtg |
| NO: 500 | atgaaagtgttgaaaaacttaataacaaatgcttgttgggcaagaatgggattgaggattatcttctctcagaaaggcattgt |
| | gaaggaattgagccagatctctctccctactgcaaaaccctattgtagta |
| 222895_s_at | gttctctcatttaatgcacactgatgatattgtagggatgggtggggtggggatcttgcaaatttctattctcttttactgaa |
| SEQ ID | aaagcaggggatgagttccatcagaaggtgcccagcgctacttcccaggtttttattttttttttcctatctcattaggttgg |
| NO: 501 | aaggtactaaatattgaactgttaagattagacatttgaattctgttgacccgcactttaaagcttttgtttgcatttaaatt |
| | aaatggcttctaaacaagaaattgcagcatattcttctctttggcccagaggtgggttaaactgtaagggacagctgagattg |
| | agtgtcagtattgctaagcgtggcattcacaatactggcactataaagaacaaaataaaataataatttataggacagttttt |
| | ctactgccattcaatttgatgtgagtgccttgaaaactgatcttcctatttgagtctcttgaga |
| 226218_at | ctaattggttctgcccaatctcctttcagattttattaggaaaaaaaaataaacctcctgatcggagacaatgtattaatcag |
| SEQ ID | aagtgtaaactgccagttctatatagcatgaaatgaaaagacagctaatttggtccaacaaacatgactgggtctagggcacc |
| NO: 502 | caggctgattcagctgatttcctaccagcctttgcctcttccttcaatgtggtttccatgggaatttgcttcagaaaagccaa |
| | gtatgggctgttcagaggtgcacacctgcattttctnagctcttctagaggggctaagagacttggtacgggccaggaagaat |
| | atgtggcagagctcctggaaatgatgcagattaggtggcatttttgtcagctctgtggtttattgttgggactattctttaaa |
| | atatccattgttcactacagtgaagatctctgatttnaccgtgtactatccacatgcattacaaacatttcgcagagctgct |
| 227346_at | tgcttttggtgcgatggcactcactgtgaacatgtgtaaccacatattaatatgcaatattgtttccaatactttctaataca |
| SEQ ID | gttttttataatgttgngtgtggtgattgttcaggtcgaatctgttgtatccagtacagctttaggtcttcagctgcccttct |
| NO: 503 | ggcgagtacatgcacaggattgtaaatgagaaatgcagtcatatttccagtctgcctctatgatgatgttaaattattgctgt |
| | ttagctgtgaacaagggatgtaccactggaggaatagagtatccttttgtacacattttgaaatgcttcttctgtagtgatag |
| | aac |
| 228362_s_at | gtactggcccttcggattgaaagtatacagtgatgaaatttgctgccactctttcatgcttggagtgttatattcttttggat |
| SEQ ID | gcgagccctcaaagaaacatttaatattctcttttgccaattcagttgcatgctctgtggctttacttttaaggatctgctgc |
| NO: 504 | tcctgttccaaatagattttccagaatttcagctgcagaaaactaactggagataggcatcgggtgacagatgtaaaaatcag |
| | aagaatgatgataacaactgctatcaagatccagcccaac |
| 229152_at | tgaagaaagttctcctcctgatcacagccatcttggcagtggctgttggtttcccagtctctcaagaccaggaacgagaaaaa |
| SEQ ID | agaagtatcagtgacagcgatgaattagcttcagggttttttgtgttcccttacccatatccatttcgcccacttccaccaat |
| NO: 505 | tccatttccaagatttccatggtttagacgtaattttcctattccaatacctgaatctgcccctacaactccccttcctagcg |
| | aaaagtaaacaagaaggaaaagtcacgataaacctggtcacctgaaattgaaattgagccacttccttgaagaatcaaaattc |
| | ctgttaataaaagaaaaacaaatgtaattgaaatagcacacagcattctctagtcaatatctttagtgatcttctttaata |
| 231577_s_at | ggaacaggagcaactactaaaagagggatttcaaaaagaaagcagaataatgaaaaatgagatacaggatctccagacgaaaa |
| SEQ ID | tgagacgacgaaaggcatgtaccataagctaaagaccagagccttcctgtcacccctaaccaaggcataattgaaacaatttt |
| NO: 506 | agaatttggaacaagcgtcactacatttgataataattagatcttgcatcataacaccaaaagtttataaaggcatgtggtac |
| | aatgatcaaaatc |
| 236280_at | aaaagatctctcactgggaaaagaaaaagttatgcatttataaagtaattaaactggttttccttgtactttattaatctgaa |
| SEQ ID | tctaatggcacttccttacgagggttttcagatgtgcttgtagttaatggcaacattatcagaatgactacacagacagtcct |
| NO: 507 | actctgaggagatgactttggaagaaacccatttggaactacacaccctgctatgtctgtggagaaatggaactgcaatcctc |
| | aagagtcacacttcatattccttcctttcaagtggttgataaaaggtagtgcttcaagcacaggatttatggaatagttggca |
| | aattaaacaacatgctttttattttgactacca |

TABLE 14
18 PS gene list probe sequences

| | | | | | | |
|---|---|---|---|---|---|---|
| | | | Probe | | | |
| Probe Set | | | Interrogation | | Target | |
| Name | Probe.X | Probe.Y | Position | Probe Sequence | Strandedness | SEQ ID NO: |

| | | | | | | |
|---|---|---|---|---|---|---|
| 1562031_at | 1147 | 61 | 1892 | ATGTTCACTGTATGTGCCAAGCCTA | Antisense | 508 |
| 1562031_at | 289 | 165 | 1898 | ACTGTATGTGCCAAGCCTAATATGA | Antisense | 509 |
| 1562031_at | 811 | 761 | 1905 | GTGCCAAGCCTAATATGAGAGCTAT | Antisense | 510 |
| 1562031_at | 374 | 1103 | 1933 | TTATAGAGTTTATGCTACAGCCCTA | Antisense | 511 |
| 1562031_at | 1143 | 113 | 1937 | AGAGTTTATGCTACAGCCCTACCTT | Antisense | 512 |
| 1562031_at | 529 | 189 | 1949 | ACAGCCCTACCTTCAGGAAACTTAT | Antisense | 513 |
| 1562031_at | 743 | 77 | 1963 | AGGAAACTTATCTACTGGACAAACA | Antisense | 514 |
| 1562031_at | 377 | 179 | 2022 | ACATTGTAATTATCTAGCATAGGCA | Antisense | 515 |
| 1562031_at | 519 | 519 | 2038 | GCATAGGCAAATATAGACAGTAACA | Antisense | 516 |
| 1562031_at | 968 | 229 | 2059 | AACAGACAGGTTTACAATTATTAAG | Antisense | 517 |
| 1562031_at | 442 | 293 | 2073 | CAATTATTAAGAAAGGGCAGCCAGG | Antisense | 518 |
| 1563497_at | 251 | 1063 | 4804 | TACCATAGCAAGTTCTTATCCTTTG | Antisense | 519 |
| 1563497_at | 173 | 157 | 4861 | ACCTGTCACAGTAATATGCCAATTT | Antisense | 520 |
| 1563497_at | 943 | 467 | 4878 | GCCAATTTTTGGTGTCGCTTTAGTA | Antisense | 521 |
| 1563497_at | 834 | 749 | 4965 | GTCTTTCCTCAGTTGTCTCCTAAAA | Antisense | 522 |
| 1563497_at | 555 | 677 | 5022 | GATCGTCTTGTGCAGCCCTTTAAAA | Antisense | 523 |
| 1563497_at | 941 | 53 | 5048 | ATGCGTTTTGCATTCATGTCTTTGC | Antisense | 524 |
| 1563497_at | 920 | 365 | 5088 | CTTTCATTTTGGGAGTGACTGTCAT | Antisense | 525 |
| 1563497_at | 1079 | 189 | 5141 | ACACCAGGGCCAGATTGCGTGGGTT | Antisense | 526 |
| 1563497_at | 610 | 965 | 5156 | TGCGTGGGTTCTAGCTAGGGACCTA | Antisense | 527 |
| 1563497_at | 1053 | 141 | 5182 | AGCTGGTTACTTGATTTCTCTCTGT | Antisense | 528 |
| 1563497_at | 93 | 1137 | 5197 | TTCTCTCTGTTCCATTTACTATCTG | Antisense | 529 |
| 202290_at | 1042 | 87 | 267 | AGGGCTCATCGACATCGAGAACCCC | Antisense | 530 |
| 202290_at | 470 | 825 | 318 | GGTCACACAACTGGATCTGGACGGG | Antisense | 531 |
| 202290_at | 672 | 839 | 336 | GGACGGGCCAAAGGAGCTTTCGAGG | Antisense | 532 |
| 202290_at | 567 | 51 | 412 | ATGCACTTGGCCGGGAAGACAGAGC | Antisense | 533 |
| 202290_at | 1035 | 885 | 458 | GGCTGGCCATCATCCGGAAACAGCG | Antisense | 534 |
| 202290_at | 550 | 659 | 484 | GAGGAGGCTGCCCGGAAGAAGGAAG | Antisense | 535 |
| 202290_at | 101 | 211 | 523 | AAAGACGATGCCACATTGTCAGGAA | Antisense | 536 |
| 202290_at | 907 | 861 | 544 | GGAAAACGAATGCAGTCACTCTCCC | Antisense | 537 |
| 202290_at | 601 | 529 | 555 | GCAGTCACTCTCCCTGAATAAGTAA | Antisense | 538 |
| 202290_at | 637 | 1039 | 573 | TAAGTAACTGCGACCCGTGGGAGGA | Antisense | 539 |
| 202290_at | 105 | 813 | 764 | GGGGTAGCTGCTATCTTTGAGACAG | Antisense | 540 |
| 203992_s_at | 114 | 77 | 4286 | AGGAAATAACCCAGTTCTGCACCAC | Antisense | 541 |
| 203992_s_at | 245 | 463 | 4307 | CCACTGGTTTTTGTAGCTATCTCGT | Antisense | 542 |
| 203992_s_at | 1100 | 367 | 4323 | CTATCTCGTAAGGCTGCTGGCTGAA | Antisense | 543 |
| 203992_s_at | 261 | 397 | 4343 | CTGAAAACTGTGTCTATGCAACCTT | Antisense | 544 |
| 203992_s_at | 578 | 543 | 4360 | GCAACCTTCCAAGTGCGGAGTGTCA | Antisense | 545 |
| 203992_s_at | 92 | 495 | 4374 | GCGGAGTGTCAACCAACTGGACGGG | Antisense | 546 |
| 203992_s_at | 443 | 411 | 4395 | CGGGAGAGAGTACTGCTCCTACTCC | Antisense | 547 |
| 203992_s_at | 638 | 373 | 4413 | CTACTCCAGGACTCTCACAAAGCTG | Antisense | 548 |
| 203992_s_at | 124 | 239 | 4494 | AACTGGCAACATCTTACAGACTACT | Antisense | 549 |
| 203992_s_at | 416 | 611 | 4512 | GACTACTGACTTGAAGACAACCTCT | Antisense | 550 |
| 203992_s_at | 711 | 59 | 4754 | ATGATGGTTACACTTTTGGTTCCTA | Antisense | 551 |
| 205518_s_at | 831 | 1027 | 1672 | TCAAGAATTCACTGATCTGATGCAA | Antisense | 552 |
| 205518_s_at | 760 | 1079 | 1707 | TATCATTACATCTTGAACCCAGGAA | Antisense | 553 |
| 205518_s_at | 705 | 1 | 1769 | ATAGATAATTCCACGTTGCCTTTGT | Antisense | 554 |
| 205518_s_at | 470 | 163 | 1781 | ACGTTGCCTTTGTGATTTGTATATA | Antisense | 555 |
| 205518_s_at | 429 | 23 | 1846 | ATATTTTACTTGTTCCATCCACAGT | Antisense | 556 |
| 205518_s_at | 1070 | 1145 | 1858 | TTCCATCCACAGTTCTCTACAGAAA | Antisense | 557 |
| 205518_s_at | 583 | 271 | 2006 | AATGGTCTGTTTTCGTGATATTCGT | Antisense | 558 |
| 205518_s_at | 962 | 707 | 2070 | GTTAACTAGCATTCTGTTTTACATG | Antisense | 559 |
| 205518_s_at | 263 | 345 | 2091 | CATGTTGACATTTCTAACACACACA | Antisense | 560 |
| 205518_s_at | 1128 | 307 | 2108 | CACACACACCACTGATTTGAACTTC | Antisense | 561 |
| 205518_s_at | 818 | 21 | 2151 | ATATATGCTAGGTCTGATTCTGAAG | Antisense | 562 |
| 206618_at | 1048 | 569 | 2935 | GAAGCATATCCAGAGGGCGAAAGAT | Antisense | 563 |
| 206618_at | 622 | 885 | 2950 | GGCGAAAGATATCTCTCCATTGTGC | Antisense | 564 |
| 206618_at | 25 | 349 | 2974 | CATCTGCCTCTTTTGACGTTGGAAG | Antisense | 565 |
| 206618_at | 812 | 865 | 2994 | GGAAGACACATGTCTTACTCCCCAA | Antisense | 566 |
| 206618_at | 498 | 1057 | 3009 | TACTCCCCAAAGGGAGCCCAGCACT | Antisense | 567 |
| 206618_at | 317 | 853 | 3035 | GGAGCCTTCTTGATGATCTCAAAAA | Antisense | 568 |
| 206618_at | 3 | 771 | 3086 | GTGACTGTGAAACCGTCAGTTCGGA | Antisense | 569 |
| 206618_at | 182 | 589 | 3094 | GAAACCGTCAGTTCGGAAGGCTGGT | Antisense | 570 |
| 206618_at | 601 | 559 | 3109 | GAAGGCTGGTTAGAACATGTGGGAG | Antisense | 571 |
| 206618_at | 804 | 765 | 3253 | GTGCTTACAATTTTGTGTACCAACT | Antisense | 572 |
| 206618_at | 118 | 689 | 3364 | GATTTCATTGCTATTGCATAGTCTC | Antisense | 573 |
| 212684_at | 268 | 611 | 1158 | GACTATTTCAAAGCTACTGTTCCTA | Antisense | 574 |
| 212684_at | 555 | 699 | 1176 | GTTCCTAGTCCAGCTTTAAGTTTCG | Antisense | 575 |
| 212684_at | 683 | 499 | 1212 | GCTGTTTTGTTTCATGATTTCGTTA | Antisense | 576 |
| 212684_at | 414 | 671 | 1305 | GATGATGGTGTCCTTTAGGGCTCTT | Antisense | 577 |
| 212684_at | 1067 | 89 | 1321 | AGGGCTCTTGGAGCAGCCAGACCAT | Antisense | 578 |
| 212684_at | 957 | 103 | 1399 | AGTTGTCCTGGGGCTGAATGGGCAA | Antisense | 579 |
| 212684_at | 1098 | 557 | 1414 | GAATGGGCAAATCTGTCCAAACAGC | Antisense | 580 |
| 212684_at | 596 | 495 | 1437 | GCTAGTAACCGGCTGTGAGGGAGAG | Antisense | 581 |
| 212684_at | 844 | 745 | 1463 | GTCAGAAGCACTTAGCGTTGGCCTC | Antisense | 582 |
| 212684_at | 377 | 61 | 1532 | ATGATTTTCTCTAAATGCCTGGGTA | Antisense | 583 |
| 212684_at | 148 | 1127 | 1565 | TTCAAGGAGCTCACTTGGCCTGCTT | Antisense | 584 |
| 212776_s_at | 63 | 1003 | 2263 | TCTCCTCGTGGATCGTGTATCCCAG | Antisense | 585 |
| 212776_s_at | 507 | 983 | 2265 | TCCTCGTGGATCGTGTATCCCAGCG | Antisense | 586 |
| 212776_s_at | 1108 | 411 | 2276 | CGTGTATCCCAGCGGCAAGGTGTAT | Antisense | 587 |
| 212776_s_at | 210 | 723 | 2279 | GTATCCCAGCGGCAAGGTGTATGTG | Antisense | 588 |
| 212776_s_at | 163 | 461 | 2284 | CCAGCGGCAAGGTGTATGTGGCAGC | Antisense | 589 |
| 212776_s_at | 1127 | 915 | 2324 | TGTGGTGCTGACCTGTGAGCTATGC | Antisense | 590 |
| 212776_s_at | 404 | 531 | 2358 | GCAGAGGTGCGCTGGACCAAGGATG | Antisense | 591 |
| 212776_s_at | 4 | 129 | 2461 | AGCTCGAGGACTCCGGCGAGTACTT | Antisense | 592 |
| 212776_s_at | 921 | 411 | 2465 | CGAGGACTCCGGCGAGTACTTGTGT | Antisense | 593 |
| 212776_s_at | 512 | 613 | 2469 | GACTCCGGCGAGTACTTGTGTGAAA | Antisense | 594 |
| 212776_s_at | 362 | 197 | 2491 | AAATTGACGATGAGTCGGCCTCCTT | Antisense | 595 |
| 215666_at | 26 | 587 | 760 | GAAAAATCCGTGGAACTGAAGCTGA | Antisense | 596 |
| 215666_at | 830 | 167 | 774 | ACTGAAGCTGAGATCTTTAGTACGT | Antisense | 597 |
| 215666_at | 643 | 643 | 783 | GAGATCTTTAGTACGTGGAGTCACC | Antisense | 598 |
| 215666_at | 618 | 733 | 793 | GTACGTGGAGTCACCTTACAGATAC | Antisense | 599 |
| 215666_at | 1159 | 845 | 799 | GGAGTCACCTTACAGATACAGAGCA | Antisense | 600 |
| 215666_at | 560 | 1025 | 803 | TCACCTTACAGATACAGAGCATTTA | Antisense | 601 |
| 215666_at | 373 | 631 | 819 | GAGCATTTATGCGGTATTCATTGGT | Antisense | 602 |
| 215666_at | 288 | 1079 | 826 | TATGCGGTATTCATTGGTGCCTAAA | Antisense | 603 |
| 215666_at | 878 | 717 | 832 | GTATTCATTGGTGCCTAAAGAACTT | Antisense | 604 |
| 215666_at | 1006 | 209 | 848 | AAAGAACTTTAGGCATCCTCTGGAA | Antisense | 605 |
| 215666_at | 66 | 1117 | 856 | TTAGGCATCCTCTGGAAAACCGGCC | Antisense | 606 |
| 219551_at | 696 | 579 | 285 | GAACAGGTGACCATAACTCTGCCAA | Antisense | 607 |
| 219551_at | 242 | 67 | 370 | ATGTGGAATTCAGCCAGGACTCCCA | Antisense | 608 |
| 219551_at | 56 | 473 | 382 | GCCAGGACTCCCAATCTTGTAAAAC | Antisense | 609 |
| 219551_at | 709 | 107 | 420 | AGATAAGATGTCCCCAGCATCTCCA | Antisense | 610 |
| 219551_at | 925 | 103 | 511 | AGTTCATCAGATTCCAAAAGTTCAT | Antisense | 611 |
| 219551_at | 263 | 259 | 528 | AAGTTCATCATCTTCAAGTAGTGAG | Antisense | 612 |
| 219551_at | 877 | 693 | 580 | GATTGCAAATCCTCTACTTCTGATA | Antisense | 613 |
| 219551_at | 470 | 547 | 609 | GAATTGTGTCTCAGGACATCCTACC | Antisense | 614 |
| 219551_at | 976 | 605 | 623 | GACATCCTACCATGACACAGTACAG | Antisense | 615 |
| 219551_at | 529 | 107 | 676 | AGATTTCGAGACAACAGTGGCCTTC | Antisense | 616 |
| 219551_at | 542 | 185 | 689 | ACAGTGGCCTTCTGATGAATACTTT | Antisense | 617 |
| 220301_at | 373 | 35 | 1467 | ATAAGTCATTTCTAATCTTTGTATA | Antisense | 618 |
| 220301_at | 603 | 605 | 1572 | GACAGGCTGTAAGCATCGCTGAGAA | Antisense | 619 |
| 220301_at | 1151 | 77 | 1603 | AGGACTTTTGACTTTTATCTGGATA | Antisense | 620 |
| 220301_at | 333 | 39 | 1645 | ATCATGGAAAGGCATCAGCATTGCA | Antisense | 621 |
| 220301_at | 931 | 519 | 1675 | GCATCTAGGTAGAAATCAGGCCAAA | Antisense | 622 |
| 220301_at | 70 | 303 | 1696 | CAAAATTAAGCTGTGGTTTCCCTCT | Antisense | 623 |
| 220301_at | 417 | 829 | 1710 | GGTTTCCCTCTGAGTAGTGGGAATA | Antisense | 624 |
| 220301_at | 313 | 253 | 1851 | AAGACACTTATAATTTTCCATACCT | Antisense | 625 |
| 220301_at | 975 | 15 | 1863 | ATTTTCCATACCTATTTTCAACTGA | Antisense | 626 |
| 220301_at | 1035 | 543 | 1890 | GCAACTTGTAAGATTTAACTCAGTC | Antisense | 627 |
| 220301_at | 759 | 293 | 1914 | CAATAACATACTGGTTTTACTCATC | Antisense | 628 |
| 223095_at | 224 | 971 | 2789 | TGCCTGTAGCATTCCAGAGCTCACT | Antisense | 629 |
| 223095_at | 330 | 377 | 2858 | CTCACTCTGTCTGCCAGGTATGAGA | Antisense | 630 |
| 223095_at | 223 | 127 | 2880 | AGAAGAACACGTAAGACCGCCACCA | Antisense | 631 |
| 223095_at | 975 | 391 | 2952 | CTGCCCCCAGAACTTTTGGATACTG | Antisense | 632 |
| 223095_at | 448 | 843 | 2976 | GGAGGCAGTTGCATAGGTCTCCCTC | Antisense | 633 |
| 223095_at | 239 | 489 | 3024 | GCCCAAGACTACTCTGGGCAGCTCC | Antisense | 634 |
| 223095_at | 148 | 861 | 3079 | GGAAAGGATTTCTACAGTGTTCTAT | Antisense | 635 |
| 223095_at | 417 | 115 | 3114 | AGAGAGAGTGGGTTTGGGAAGAGTG | Antisense | 636 |
| 223095_at | 141 | 697 | 3145 | GTTGGGGAGAGGGGACCGATGTGCC | Antisense | 637 |
| 223095_at | 136 | 621 | 3158 | GACCGATGTGCCTCATTGTTTAGTG | Antisense | 638 |
| 223095_at | 581 | 1139 | 3201 | TTCTGGATAAAGTTTGGTTGTTTGC | Antisense | 639 |
| 227927_at | 779 | 1061 | 1233 | TACCTCTGTCGACCTGTGAAACTGA | Antisense | 640 |
| 227927_at | 587 | 445 | 1235 | CCTCTGTCGACCTGTGAAACTGAAC | Antisense | 641 |
| 227927_at | 525 | 589 | 1250 | GAAACTGAACAAACAGCTTATCTGC | Antisense | 642 |
| 227927_at | 631 | 515 | 1265 | GCTTATCTGCCCCTAATGTGAAATG | Antisense | 643 |
| 227927_at | 230 | 365 | 1266 | CTTATCTGCCCCTAATGTGAAATGA | Antisense | 644 |
| 227927_at | 753 | 45 | 1269 | ATCTGCCCCTAATGTGAAATGATGG | Antisense | 645 |
| 227927_at | 467 | 485 | 1273 | GCCCCTAATGTGAAATGATGGGACA | Antisense | 646 |
| 227927_at | 867 | 277 | 1400 | AATCCAGCAGGAGTTTCTTAGTTAG | Antisense | 647 |
| 227927_at | 1130 | 715 | 1412 | GTTTCTTAGTTAGGATCCACAGCCT | Antisense | 648 |
| 227927_at | 811 | 363 | 1416 | CTTAGTTAGGATCCACAGCCTGGGA | Antisense | 649 |
| 227927_at | 909 | 999 | 1483 | TCTGCATTTCTTGAAACCATTATTA | Antisense | 650 |
| 228128_x_at | 382 | 667 | 281 | GATGTTGAAACCTGTTTGGCACCTT | Antisense | 651 |
| 228128_x_at | 666 | 719 | 294 | GTTTGGCACCTTCTGGAAGCTACCA | Antisense | 652 |
| 228128_x_at | 1075 | 349 | 358 | CATAAGAATTCTACTGGCCTATTGT | Antisense | 653 |
| 228128_x_at | 690 | 219 | 447 | AAACACAATTCCAATCCTTTTTCTG | Antisense | 654 |
| 228128_x_at | 199 | 839 | 529 | GGATCTAAGTTAAATCTTTTGGCAA | Antisense | 655 |
| 228128_x_at | 341 | 173 | 661 | ACTCAGACATATTTTGCTGTTCATG | Antisense | 656 |
| 228128_x_at | 6 | 441 | 696 | CCTGTTCTCATGGATTTGTTTTCCC | Antisense | 657 |
| 228128_x_at | 714 | 687 | 708 | GATTTGTTTTCCCATACTGTTTTCT | Antisense | 658 |
| 228128_x_at | 157 | 351 | 720 | CATACTGTTTTCTCTGATCTCAATT | Antisense | 659 |
| 228128_x_at | 996 | 43 | 736 | ATCTCAATTACAGGTTGGATCTCAC | Antisense | 660 |
| 228128_x_at | 618 | 15 | 786 | ATTTTGCCACTGTTGATTACTATAC | Antisense | 661 |
| 228812_at | 843 | 637 | 765 | GAGACTTCATTGGTGATACACTCAA | Antisense | 662 |
| 228812_at | 406 | 775 | 777 | GTGATACACTCAATTTTTACTGGGT | Antisense | 663 |
| 228812_at | 488 | 509 | 807 | GCTAATAATGTTGGTCACTGTCTCA | Antisense | 664 |
| 228812_at | 742 | 301 | 869 | CACAAAGCTTTTGGGTAACCAGCGT | Antisense | 665 |
| 228812_at | 873 | 805 | 881 | GGGTAACCAGCGTTCTTAAATGTAT | Antisense | 666 |
| 228812_at | 552 | 1075 | 903 | TATGGTTTTTGACCAGGTGAACCCT | Antisense | 667 |
| 228812_at | 775 | 623 | 913 | GACCAGGTGAACCCTTTAGAAGTGA | Antisense | 668 |
| 228812_at | 1155 | 199 | 963 | AAATACCTTTGGCTGTGATGAATGT | Antisense | 669 |
| 228812_at | 1101 | 953 | 981 | TGAATGTAGATCCCAGCAGAATACC | Antisense | 670 |
| 228812_at | 137 | 1153 | 1021 | TTGACTGAGTATTTGTAGATGCTTA | Antisense | 671 |
| 228812_at | 198 | 259 | 1091 | AAGTTCTCAGGTACTGTTCAATTAT | Antisense | 672 |
| 229022_at | 446 | 587 | 826 | GAAACACTTTTAGAGCACTTGAGGA | Antisense | 673 |
| 229022_at | 167 | 27 | 937 | ATAGGACCCCAGACAGTTTATACCT | Antisense | 674 |
| 229022_at | 124 | 715 | 952 | GTTTATACCTTCCATTTGCTGTTTT | Antisense | 675 |
| 229022_at | 697 | 263 | 979 | AAGTGTGAGCCTGCCAAGTCAACAA | Antisense | 676 |
| 229022_at | 990 | 479 | 987 | GCCTGCCAAGTCAACAAGTATGCCT | Antisense | 677 |
| 229022_at | 645 | 297 | 1001 | CAAGTATGCCTTTAGCGCACATGTA | Antisense | 678 |
| 229022_at | 328 | 311 | 1018 | CACATGTAAATAGCCTGCACTTCCT | Antisense | 679 |
| 229022_at | 744 | 539 | 1034 | GCACTTCCTAAATCTCGTGTGGCCT | Antisense | 680 |
| 229022_at | 835 | 15 | 1195 | ATTTTGCCACATTCTGTAACTGTTT | Antisense | 681 |
| 229022_at | 529 | 1101 | 1256 | TTTCATCTTTTGTTTCGTGTATATA | Antisense | 682 |
| 229022_at | 845 | 777 | 1272 | GTGTATATACTGTTTGCCTTTTTCA | Antisense | 683 |
| 233976_at | 677 | 939 | 1736 | TGAGTCTTTTGAACACAGGTATGAA | Antisense | 684 |
| 233976_at | 225 | 1007 | 1773 | TCTAAACCAATGTTACCCCTACCAT | Antisense | 685 |
| 233976_at | 757 | 707 | 1784 | GTTACCCCTACCATACAGGTATGTT | Antisense | 686 |
| 233976_at | 975 | 243 | 1874 | AACCACATTAAATATTCTGTCCATT | Antisense | 687 |
| 233976_at | 985 | 957 | 1951 | TGCAGCATGCAAGGCAAGATGACAA | Antisense | 688 |
| 233976_at | 76 | 201 | 2024 | AAATAATTATGACATGCTTTCTGAA | Antisense | 689 |
| 233976_at | 948 | 261 | 2047 | AAGTGTCCCCAGATAGTTTCATAAA | Antisense | 690 |
| 233976_at | 127 | 587 | 2093 | GAAAAACCCATAGACATCATGTTCA | Antisense | 691 |
| 233976_at | 1001 | 935 | 2125 | TGATGACAAGGCATGTTCATAACCC | Antisense | 692 |
| 233976_at | 725 | 313 | 2168 | CAGCTAAATAACTGCAATACTTTTG | Antisense | 693 |
| 233976_at | 781 | 647 | 2196 | GAGTTTGGCAGGTTTCGAAGATGTG | Antisense | 694 |
| 244008_at | 1036 | 1053 | 112 | TACATTTCACATTTACCAGCAAGTC | Antisense | 695 |
| 244008_at | 485 | 285 | 144 | AATAGTGCTTATTTACATAGTCAAT | Antisense | 696 |
| 244008_at | 163 | 41 | 193 | ATCTTCGATCTGCCCAATATTTAAT | Antisense | 697 |
| 244008_at | 784 | 685 | 269 | GATATGCCTATGTTTCTTTAACTAT | Antisense | 698 |
| 244008_at | 58 | 1011 | 283 | TCTTTAACTATACAGCCTCTTTACA | Antisense | 699 |
| 244008_at | 121 | 721 | 338 | GTATTGCAACCTGCTATTTAGCCTT | Antisense | 700 |
| 244008_at | 473 | 17 | 353 | ATTTAGCCTTTGGTGCCTTAGAATT | Antisense | 701 |
| 244008_at | 872 | 1099 | 443 | TTTCTCTATTCACTTTTTATTGCTC | Antisense | 702 |
| 244008_at | 199 | 7 | 461 | ATTGCTCTTGCTTTCTATTGCTACT | Antisense | 703 |
| 244008_at | 591 | 509 | 480 | GCTACTAAAGCCTCTTTTATCCAGC | Antisense | 704 |
| 244008_at | 316 | 739 | 508 | GTAATAGTTCCAACATTGTAGCGAA | Antisense | 705 |

TABLE 15
250 PS gene list probe sequences

| | | | | | | |
|---|---|---|---|---|---|---|
| | | | Probe | | | |
| Probe Set | | | Interrogation | | Target | |
| Name | Probe.X | Probe.Y | Position | Probe Sequence | Strandedness | SEQ ID NO: |

| | | | | | | |
|---|---|---|---|---|---|---|
| 1553555_at | 371 | 809 | 416 | GGGTCTCCAGGAAGATCTCCCAGAT | Antisense | 706 |
| 1553555_at | 1082 | 911 | 446 | TGGGTATTATTCTTTGCTCCTGCAT | Antisense | 707 |
| 1553555_at | 364 | 1107 | 496 | TTTTTTAGCAGACCTCACTTCACAG | Antisense | 708 |
| 1553555_at | 628 | 1099 | 595 | TTTCTCTTCTGCTATCTGTGGTCTG | Antisense | 709 |
| 1553555_at | 405 | 85 | 695 | AGGTCTATACCAGAAACTCTCGTGA | Antisense | 710 |
| 1553555_at | 820 | 351 | 738 | CATTAAAGCCCTCAAGTCTCTTGTC | Antisense | 711 |
| 1553555_at | 1062 | 1137 | 769 | TTCTGCTTCTTTGTGATATCATCCT | Antisense | 712 |
| 1553555_at | 941 | 23 | 784 | ATATCATCCTGTGTTGCCTTCATCT | Antisense | 713 |
| 1553555_at | 1123 | 447 | 816 | CCTACTGATTCTGTGGCGCGACAAA | Antisense | 714 |
| 1553555_at | 5 | 839 | 863 | GGATAATGGCAGCTTGTCCCTCTGG | Antisense | 715 |
| 1553555_at | 940 | 141 | 930 | AGCTGTGATGACCATTCTGCTCTGG | Antisense | 716 |
| 1554999_at | 503 | 715 | 2949 | GTTTACCTAGTATTCATCACCCTGC | Antisense | 717 |
| 1554999_at | 888 | 1155 | 2974 | TTGTTTTCTCTGTGTTATGTCTTGG | Antisense | 718 |
| 1554999_at | 144 | 861 | 2997 | GGAAACCCTTCCATGTCAATGTAGG | Antisense | 719 |
| 1554999_at | 784 | 723 | 3027 | GTATCTTCTTTCAGCTGCTATACAG | Antisense | 720 |
| 1554999_at | 977 | 917 | 3062 | TGTGATTGGGCCATGTTTCTTTTTC | Antisense | 721 |
| 1554999_at | 765 | 261 | 3180 | AAGTCCCTTCTTCATATCAAACTCT | Antisense | 722 |
| 1554999_at | 90 | 1085 | 3224 | TATAGTTGTGGGTTGCTCTTGTAAA | Antisense | 723 |
| 1554999_at | 416 | 339 | 3249 | CAGGCTTTACTGACTGTGAAACTTC | Antisense | 724 |
| 1554999_at | 1085 | 1099 | 3291 | TTTCTACTCTGCACTTGATCTTAGC | Antisense | 725 |
| 1554999_at | 279 | 635 | 3325 | GAGAAGCGATTCTACCCTGGATAGT | Antisense | 726 |
| 1554999_at | 140 | 87 | 3377 | AGGTGTTTATTAGCCATTCTGAGTA | Antisense | 727 |
| 1556209_at | 465 | 105 | 253 | AGATTATGGCCTATTGAACAAAATG | Antisense | 728 |
| 1556209_at | 242 | 589 | 279 | GAAACTGGGAGTCCACAAAGACATA | Antisense | 729 |
| 1556209_at | 124 | 593 | 308 | GAAAGATGAAGTACCTCCTGACAGA | Antisense | 730 |
| 1556209_at | 357 | 565 | 315 | GAAGTACCTCCTGACAGAGCAAGAA | Antisense | 731 |
| 1556209_at | 202 | 859 | 361 | GGACAATGGCTATTTTATTCAAGAC | Antisense | 732 |
| 1556209_at | 375 | 637 | 403 | GAGACTAGGACTCAGTCTGAACTGA | Antisense | 733 |
| 1556209_at | 310 | 681 | 479 | GATCACACACCGTATGTGTTTGCTA | Antisense | 734 |
| 1556209_at | 337 | 929 | 495 | TGTTTGCTAACTGGCTTTACCCAAA | Antisense | 735 |
| 1556209_at | 464 | 861 | 612 | GGAAAAAGGCACTCAGGGCACACAG | Antisense | 736 |
| 1556209_at | 912 | 289 | 653 | AATTCTCTACAAACCTAGTTGCTAA | Antisense | 737 |
| 1556209_at | 869 | 1147 | 671 | TTGCTAAAACTACCTGTTGTAACCT | Antisense | 738 |
| 1556341_s_at | 335 | 75 | 2430 | AGGCTGTGCTGGACCTGGCTTCATT | Antisense | 739 |
| 1556341_s_at | 18 | 1131 | 2449 | TTCATTTCTGCTCCAGGATGGCAGG | Antisense | 740 |
| 1556341_s_at | 184 | 1013 | 2482 | TCTTCATGGCTGCATGACCAGCCTG | Antisense | 741 |
| 1556341_s_at | 974 | 1073 | 2529 | TAGGTGTACACTGGGAGCCGTGCCA | Antisense | 742 |
| 1556341_s_at | 411 | 165 | 2538 | ACTGGGAGCCGTGCCATGTTTCAGG | Antisense | 743 |
| 1556341_s_at | 331 | 973 | 2549 | TGCCATGTTTCAGGCCCTGTCCTGG | Antisense | 744 |
| 1556341_s_at | 763 | 809 | 2583 | GGGTGCGGGACCTTGGTCCTCCACA | Antisense | 745 |
| 1556341_s_at | 28 | 913 | 2627 | TGGGTTGAGATTCACATGTGCTCCT | Antisense | 746 |
| 1556341_s_at | 986 | 183 | 2640 | ACATGTGCTCCTTACGACCACGGGT | Antisense | 747 |
| 1556341_s_at | 864 | 159 | 2691 | ACCCTTCGCTGTGTGCATATTCGTG | Antisense | 748 |
| 1556341_s_at | 1153 | 765 | 2703 | GTGCATATTCGTGTGCTTATGAGTT | Antisense | 749 |
| 1557458_s_at | 863 | 159 | 3982 | ACCCTCTCCTTGAGTTTCTGTGAAT | Antisense | 750 |
| 1557458_s_at | 792 | 397 | 4068 | CTGATGCTGGGAGCCAAATGCTGGT | Antisense | 751 |
| 1557458_s_at | 841 | 203 | 4083 | AAATGCTGGTGCTTTGAGAGTCCCG | Antisense | 752 |
| 1557458_s_at | 15 | 765 | 4091 | GTGCTTTGAGAGTCCCGGAGGCCCC | Antisense | 753 |
| 1557458_s_at | 808 | 419 | 4124 | CGCCCCGCTGGTGTGTATATGTGTG | Antisense | 754 |
| 1557458_s_at | 613 | 825 | 4188 | GGTCACACACAGATGGGTAAGCCCA | Antisense | 755 |
| 1557458_s_at | 494 | 739 | 4204 | GTAAGCCCACTGATCTACTTGTAGT | Antisense | 756 |
| 1557458_s_at | 1037 | 677 | 4215 | GATCTACTTGTAGTCACTCAGTGTA | Antisense | 757 |
| 1557458_s_at | 222 | 99 | 4226 | AGTCACTCAGTGTAATCATTAGGCT | Antisense | 758 |
| 1557458_s_at | 249 | 41 | 4240 | ATCATTAGGCTATCTTCAAGGAATC | Antisense | 759 |
| 1557458_s_at | 310 | 1033 | 4255 | TCAAGGAATCATTGTGCAGTCAAAA | Antisense | 760 |
| 1558111_at | 478 | 217 | 1248 | AAACAGTTGATGGTGCACTCGTAGC | Antisense | 761 |
| 1558111_at | 511 | 667 | 1256 | GATGGTGCACTCGTAGCTGCAAAAT | Antisense | 762 |
| 1558111_at | 592 | 885 | 1297 | GGCTGTGACATTGAGTGGTTACACA | Antisense | 763 |
| 1558111_at | 552 | 91 | 1310 | AGTGGTTACACAGAAGACCTGCTTC | Antisense | 764 |
| 1558111_at | 1042 | 587 | 1356 | GAAACATTACTATTCAGTTGCTATT | Antisense | 765 |
| 1558111_at | 628 | 1107 | 1402 | TTTTAGTTGCTGCTCACTTATGGCC | Antisense | 766 |
| 1558111_at | 121 | 1149 | 1408 | TTGCTGCTCACTTATGGCCACAGAA | Antisense | 767 |
| 1558111_at | 561 | 893 | 1422 | TGGCCACAGAACAGTCCCTTTTTGA | Antisense | 768 |
| 1558111_at | 32 | 29 | 1434 | AGTCCCTTTTTGAGTAAAGCAGCAA | Antisense | 769 |
| 1558111_at | 670 | 275 | 1549 | AATGAACTCATTACAGCAGCTAATC | Antisense | 770 |
| 1558111_at | 423 | 133 | 1563 | AGCAGCTAATCAATGCAAACTTTGT | Antisense | 771 |
| 1561226_at | 1147 | 43 | 3089 | ATCTCCCTCAGTGCCTGGCAATGTT | Antisense | 772 |
| 1561226_at | 1100 | 1021 | 3096 | TCAGTGCCTGGCAATGTTTGTGGTT | Antisense | 773 |
| 1561226_at | 1092 | 969 | 3100 | TGCCTGGCAATGTTTGTGGTTGGTT | Antisense | 774 |
| 1561226_at | 3 | 1091 | 3112 | TTTGTGGTTGGTTGAGTGAGTTAAC | Antisense | 775 |
| 1561226_at | 449 | 773 | 3127 | GTGAGTTAACAGGAGACCATCTTTT | Antisense | 776 |
| 1561226_at | 297 | 185 | 3135 | ACAGGAGACCATCTTTTGGCCTTTT | Antisense | 777 |
| 1561226_at | 1087 | 1099 | 3159 | TTTCTACCTCTGTTTTCTCTTACTA | Antisense | 778 |
| 1561226_at | 337 | 713 | 3170 | GTTTTCTCTTACTATACTTGCCTAC | Antisense | 779 |
| 1561226_at | 897 | 1135 | 3173 | TTCTCTTACTATACTTGCCTACATC | Antisense | 780 |
| 1561226_at | 924 | 363 | 3177 | CTTACTATACTTGCCTACATCTCAT | Antisense | 781 |
| 1561226_at | 647 | 1083 | 3182 | TATACTTGCCTACATCTCATCTTCT | Antisense | 782 |
| 1562031_at | 1147 | 61 | 1892 | ATGTTCACTGTATGTGCCAAGCCTA | Antisense | 783 |
| 1562031_at | 289 | 165 | 1898 | ACTGTATGTGCCAAGCCTAATATGA | Antisense | 784 |
| 1562031_at | 811 | 761 | 1905 | GTGCCAAGCCTAATATGAGAGCTAT | Antisense | 785 |
| 1562031_at | 374 | 1103 | 1933 | TTATAGAGTTTATGCTACAGCCCTA | Antisense | 786 |
| 1562031_at | 1143 | 113 | 1937 | AGAGTTTATGCTACAGCCCTACCTT | Antisense | 787 |
| 1562031_at | 529 | 189 | 1949 | ACAGCCCTACCTTCAGGAAACTTAT | Antisense | 788 |
| 1562031_at | 743 | 77 | 1963 | AGGAAACTTATCTACTGGACAAACA | Antisense | 789 |
| 1562031_at | 377 | 179 | 2022 | ACATTGTAATTATCTAGCATAGGCA | Antisense | 790 |
| 1562031_at | 519 | 519 | 2038 | GCATAGGCAAATATAGACAGTAACA | Antisense | 791 |
| 1562031_at | 968 | 229 | 2059 | AACAGACAGGTTTACAATTATTAAG | Antisense | 792 |
| 1562031_at | 442 | 293 | 2073 | CAATTATTAAGAAAGGGCAGCCAGG | Antisense | 793 |
| 1562249_at | 1054 | 669 | 4456 | GATGACTATCTATGAACCTAAGGAG | Antisense | 794 |
| 1562249_at | 889 | 1033 | 4488 | TAATTTCTTTTGAGGGTTTGCATAA | Antisense | 795 |
| 1562249_at | 700 | 287 | 4690 | AATTTCTGGAATTTTCAATGAGCAA | Antisense | 796 |
| 1562249_at | 994 | 1043 | 4821 | TAAAATAGGCACATATCTGAAGATA | Antisense | 797 |
| 1562249_at | 1130 | 393 | 4837 | CTGAAGATAAAAGCCGAATTGACCC | Antisense | 798 |
| 1562249_at | 1134 | 11 | 4893 | ATTAATGGCTTTGAATGGCTATGAA | Antisense | 799 |
| 1562249_at | 1000 | 219 | 4917 | AAAAATAATATCTCTGCCCTCTTCA | Antisense | 800 |
| 1562249_at | 309 | 447 | 4934 | CCTCTTCACTACTCCCATGTAAAAT | Antisense | 801 |
| 1562249_at | 846 | 727 | 4969 | GTAGATTTTACCAACGTTTCAAGAG | Antisense | 802 |
| 1562249_at | 745 | 715 | 4984 | GTTTCAAGAGAGACATGATTCCCAA | Antisense | 803 |
| 1562249_at | 16 | 607 | 4995 | GACATGATTCCCAAATATTATGTAA | Antisense | 804 |
| 1563497_at | 251 | 1063 | 4804 | TACCATAGCAAGTTCTTATCCTTTG | Antisense | 805 |
| 1563497_at | 173 | 157 | 4861 | ACCTGTCACAGTAATATGCCAATTT | Antisense | 806 |
| 1563497_at | 943 | 467 | 4878 | GCCAATTTTTGGTGTCGCTTTAGTA | Antisense | 807 |
| 1563497_at | 834 | 749 | 4965 | GTCTTTCCTCAGTTGTCTCCTAAAA | Antisense | 808 |
| 1563497_at | 555 | 677 | 5022 | GATCGTCTTGTGCAGCCCTTTAAAA | Antisense | 809 |
| 1563497_at | 941 | 53 | 5048 | ATGCGTTTTGCATTCATGTCTTTGC | Antisense | 810 |
| 1563497_at | 920 | 365 | 5088 | CTTTCATTTTGGGAGTGACTGTCAT | Antisense | 811 |
| 1563497_at | 1079 | 189 | 5141 | ACACCAGGGCCAGATTGCGTGGGTT | Antisense | 812 |
| 1563497_at | 610 | 965 | 5156 | TGCGTGGGTTCTAGCTAGGGACCTA | Antisense | 813 |
| 1563497_at | 1053 | 141 | 5182 | AGCTGGTTACTTGATTTCTCTCTGT | Antisense | 814 |
| 1563497_at | 93 | 1137 | 5197 | TTCTCTCTGTTCCATTTACTATCTG | Antisense | 815 |
| 1565544_at | 778 | 729 | 1683 | GTAGAGTTCTCTAAAGGGTCTTGAT | Antisense | 816 |
| 1565544_at | 871 | 263 | 1696 | AAGGGTCTTGATATTAGTGGGACAT | Antisense | 817 |
| 1565544_at | 612 | 89 | 1711 | AGTGGGACATAATTAGTTCTAAACT | Antisense | 818 |
| 1565544_at | 704 | 95 | 1802 | AGTCACTTAACTATAGTCCAGAAAA | Antisense | 819 |
| 1565544_at | 891 | 825 | 1876 | GGTAAAATTCACAAAGTCTGCCACA | Antisense | 820 |
| 1565544_at | 205 | 97 | 1890 | AGTCTGCCACAAAGTCTGGCATCCA | Antisense | 821 |
| 1565544_at | 1138 | 257 | 1901 | AAGTCTGGCATCCAGTTGAGAACTA | Antisense | 822 |
| 1565544_at | 849 | 105 | 1914 | AGTTGAGAACTACCAGACATACAAA | Antisense | 823 |
| 1565544_at | 702 | 123 | 1971 | AGAAAAATCAATCATAACCACCCAG | Antisense | 824 |
| 1565544_at | 264 | 1017 | 1982 | TCATAACCACCCAGAACTAACACAG | Antisense | 825 |
| 1565544_at | 749 | 1051 | 2164 | TACACTGGATAGAATTAATGGCAAG | Antisense | 826 |
| 1568752_s_at | 370 | 107 | 4615 | AGATTAACATTGACAGTTCGACAAG | Antisense | 827 |
| 1568752_s_at | 224 | 703 | 4630 | GTTCGACAAGAGAGACTATCATCAG | Antisense | 828 |
| 1568752_s_at | 622 | 897 | 4717 | TGGAAAGGGATTCCTACCCCAGATT | Antisense | 829 |
| 1568752_s_at | 1092 | 689 | 4725 | GATTCCTACCCCAGATTTCTAAAGT | Antisense | 830 |
| 1568752_s_at | 318 | 735 | 4748 | GTCAGAAATGTACCAAAAACTTTTG | Antisense | 831 |
| 1568752_s_at | 806 | 175 | 4766 | ACTTTTGAAAACTATGCAGTCCAAC | Antisense | 832 |
| 1568752_s_at | 196 | 175 | 4776 | ACTATGCAGTCCAACAACAGTTTCT | Antisense | 833 |
| 1568752_s_at | 659 | 715 | 4795 | GTTTCTGACTACAACTCAAAAGTTT | Antisense | 834 |
| 1568752_s_at | 530 | 935 | 4853 | TGATCTTTTTATTTAGAAACCCACA | Antisense | 835 |
| 1568752_s_at | 795 | 589 | 4868 | GAAACCCACAAAATCAGAAACACAG | Antisense | 836 |
| 1568752_s_at | 892 | 733 | 4999 | GTACAGCAAGCCTATGTAGTTCAAT | Antisense | 837 |
| 200924_s_at | 738 | 189 | 1290 | ACAGCCTATGGAGGCTCCAGTCATG | Antisense | 838 |
| 200924_s_at | 629 | 883 | 1302 | GGCTCCAGTCATGCTGTGGGATGAG | Antisense | 839 |
| 200924_s_at | 828 | 403 | 1315 | CTGTGGGATGAGTCCAGCTTCCCTG | Antisense | 840 |
| 200924_s_at | 151 | 1141 | 1333 | TTCCCTGACATCCCAGGGGCTGTAA | Antisense | 841 |
| 200924_s_at | 301 | 815 | 1348 | GGGGCTGTAAGTGCCAACATGACTG | Antisense | 842 |
| 200924_s_at | 270 | 135 | 1433 | AGCGGAGTAAGGAGCGCTCCCTACT | Antisense | 843 |
| 200924_s_at | 251 | 991 | 1450 | TCCCTACTGCATGGGGACTTCCACG | Antisense | 844 |
| 200924_s_at | 1131 | 165 | 1514 | ACTGGGACCAGAATGAGCGTTTTCT | Antisense | 845 |
| 200924_s_at | 980 | 625 | 1528 | GAGCGTTTTCTGGTAGTGCTTAACT | Antisense | 846 |
| 200924_s_at | 834 | 1043 | 1548 | TAACTTTGGGGATGTGGGCCTCTCG | Antisense | 847 |
| 200924_s_at | 385 | 237 | 1691 | AACTGGAGCCTCACGAAGGGCTGCT | Antisense | 848 |
| 201008_s_at | 6 | 541 | 250 | GCAAAGGGGTTTCCTCGATTTGGAG | Antisense | 849 |
| 201008_s_at | 262 | 1147 | 286 | TTCCACCGTCATTTCTAACTCTTAA | Antisense | 850 |
| 201008_s_at | 782 | 213 | 310 | AAACCAACTCAGTTCCATCATGGTG | Antisense | 851 |
| 201008_s_at | 525 | 907 | 358 | TGAGGTGGTCTTTAACGACCCTGAA | Antisense | 852 |
| 201008_s_at | 587 | 563 | 437 | GAAGTTACTCGTGTCAAAGCCGTTA | Antisense | 853 |
| 201008_s_at | 1020 | 675 | 463 | GATCCTGGCTTGCGGAGTGGCTAAA | Antisense | 854 |
| 201008_s_at | 1135 | 903 | 494 | TGGATGCAGGGATCCCAGCAGTGCA | Antisense | 855 |
| 201008_s_at | 1003 | 409 | 528 | CGGAGTACCTGCGCTATGAAGACAC | Antisense | 856 |
| 201008_s_at | 1015 | 1049 | 623 | TACAAGTTCGGCTTTGAGCTTCCTC | Antisense | 857 |
| 201008_s_at | 3 | 437 | 722 | CCGAGCCAGCCAACTCAAGAGACAA | Antisense | 858 |
| 201008_s_at | 1015 | 815 | 772 | GGTGGATGTCAATACCCCTGATTTA | Antisense | 859 |
| 201010_s_at | 1118 | 775 | 2116 | GTGTTCTCCTACTGCAAATATTTTC | Antisense | 860 |
| 201010_s_at | 612 | 829 | 2153 | GGTTTTCTCTTCATGTAAGTCCTTG | Antisense | 861 |
| 201010_s_at | 776 | 931 | 2196 | TGTTCTTAGCACTTTAATTCCTGTC | Antisense | 862 |
| 201010_s_at | 968 | 499 | 2259 | GCTGAAACTGGTCTACTGTGTCTCT | Antisense | 863 |
| 201010_s_at | 909 | 593 | 2373 | GAAAGGGTTGCTGCTGTCAGCCTTG | Antisense | 864 |
| 201010_s_at | 538 | 301 | 2444 | CAACCCTGTGATCAGAACCTCCAAA | Antisense | 865 |
| 201010_s_at | 777 | 107 | 2540 | AGATAGGGATATTGGCCCCTCACTG | Antisense | 866 |
| 201010_s_at | 1097 | 313 | 2587 | CACTCTCAGCCATAGCACTTTGTTC | Antisense | 867 |
| 201010_s_at | 814 | 175 | 2603 | ACTTTGTTCACTGTCCTGTGTCAGA | Antisense | 868 |
| 201010_s_at | 668 | 917 | 2619 | TGTGTCAGAGCACTGAGCTCCACCC | Antisense | 869 |
| 201010_s_at | 799 | 139 | 2634 | AGCTCCACCCTTTTCTGAGAGTTAT | Antisense | 870 |
| 201087_at | 542 | 39 | 3029 | ATCAGGACTCTGACGTCTCTTTGGT | Antisense | 871 |
| 201087_at | 291 | 699 | 3057 | GTTGATTTACCTCTGGGCATATCCC | Antisense | 872 |
| 201087_at | 319 | 1029 | 3106 | TCACAGGTGGGATCGGCACTCAGGG | Antisense | 873 |
| 201087_at | 403 | 453 | 3240 | CCTTGGGCTCCTGATGACCAGAAAG | Antisense | 874 |
| 201087_at | 706 | 789 | 3265 | GGGCCACCGGGGTCTAATGGTGACA | Antisense | 875 |
| 201087_at | 193 | 271 | 3280 | AATGGTGACAGTCCAAACCACTCCA | Antisense | 876 |
| 201087_at | 918 | 479 | 3308 | GCCTCCTGGCAGAAGCCGAGTGTGC | Antisense | 877 |
| 201087_at | 175 | 967 | 3330 | TGCTGGGGTCTCCGAAGAGGGTCCC | Antisense | 878 |
| 201087_at | 260 | 443 | 3383 | CCTCCAAAGGTCTGATGTCTCCACT | Antisense | 879 |
| 201087_at | 9 | 475 | 3419 | GCCTTACCGCTCTGTTTATAGTGAC | Antisense | 880 |
| 201087_at | 114 | 1105 | 3433 | TTTATAGTGACCCACCCTAGATCTT | Antisense | 881 |
| 201115_at | 434 | 449 | 1082 | CCTACCAGGCCACCATTGATGGAGT | Antisense | 882 |
| 201115_at | 372 | 649 | 1103 | GAGTCAGATTTTTGGGGACATCAGG | Antisense | 883 |
| 201115_at | 816 | 799 | 1117 | GGGACATCAGGACAGAACGTGAGTG | Antisense | 884 |
| 201115_at | 1101 | 769 | 1139 | GTGACATTTTCCGATACAGCAGCAT | Antisense | 885 |
| 201115_at | 772 | 1141 | 1147 | TTCCGATACAGCAGCATGGAGGATC | Antisense | 886 |
| 201115_at | 712 | 49 | 1180 | ATCCTGGAGTGGACCCTGCGGGTCC | Antisense | 887 |
| 201115_at | 783 | 373 | 1251 | CTACAAAACTGACCCGTTCATCTTC | Antisense | 888 |
| 201115_at | 621 | 883 | 1321 | GGCTCCAAAATCATCCGAGGTCCTG | Antisense | 889 |
| 201115_at | 249 | 623 | 1348 | GACCAGACAGTGCTGTTGGTGACTG | Antisense | 890 |
| 201115_at | 53 | 513 | 1451 | GCTTCGGGGCAGAGGACGATGACCT | Antisense | 891 |
| 201115_at | 522 | 875 | 1458 | GGCAGAGGACGATGACCTGGGAGGC | Antisense | 892 |
| 201364_s_at | 63 | 183 | 370 | ACATCGTCCACTTCCAGTATGAGGT | Antisense | 893 |
| 201364_s_at | 885 | 561 | 404 | GAAGGTCTCTTCTTGGGATGCAGTC | Antisense | 894 |
| 201364_s_at | 515 | 769 | 534 | GTGAACTATGTCTTCATCTGCTTCA | Antisense | 895 |
| 201364_s_at | 720 | 89 | 562 | AGGGCCGAGAAGACAGAGCTCCACT | Antisense | 896 |
| 201364_s_at | 576 | 795 | 608 | GGGCTTTGAGATTGTACGTCCAGGC | Antisense | 897 |
| 201364_s_at | 99 | 427 | 645 | CCCTCTCGGCCAGATGTGATGTTCA | Antisense | 898 |
| 201364_s_at | 148 | 931 | 664 | TGTTCATGGTTTATCCCCTGGACCA | Antisense | 899 |
| 201364_s_at | 669 | 47 | 676 | ATCCCCTGGACCAGAACTTGTCCGA | Antisense | 900 |
| 201364_s_at | 618 | 673 | 722 | GATGCTTTACCCAAGAGCCACAGTG | Antisense | 901 |
| 201364_s_at | 290 | 883 | 788 | GGCTCCTCGCTGTCTAGGGAAGGAC | Antisense | 902 |
| 201364_s_at | 915 | 939 | 829 | TGAGGGTTGCCTATTGTGTTCTCGG | Antisense | 903 |
| 201870_at | 752 | 919 | 1290 | TGTCCTGCCCAAGTGGGCTGCAGAC | Antisense | 904 |
| 201870_at | 167 | 395 | 1307 | CTGCAGACTGAGTGCTGCCCTTGTA | Antisense | 905 |
| 201870_at | 181 | 421 | 1344 | CCCAACTCACTGCAGTTCATCTGAA | Antisense | 906 |
| 201870_at | 434 | 1131 | 1359 | TTCATCTGAACAACCTGAGCTCCTG | Antisense | 907 |
| 201870_at | 908 | 153 | 1409 | ACCTAAGGCCCTGATCCAAAGCAGC | Antisense | 908 |
| 201870_at | 1142 | 479 | 1432 | GCCTGTTGAGCTGGTTCTCCAGGGC | Antisense | 909 |
| 201870_at | 1083 | 357 | 1500 | CTTGCACAGTCTCCTATGTCTGAGC | Antisense | 910 |
| 201870_at | 466 | 627 | 1567 | GAGCCCTGACCCTTGAATGGTTGTC | Antisense | 911 |
| 201870_at | 720 | 953 | 1580 | TGAATGGTTGTCCTTGACTCTGTGC | Antisense | 912 |
| 201870_at | 612 | 627 | 1642 | GAGCCCAGTGATTGTGGCTGCTCCT | Antisense | 913 |
| 201870_at | 613 | 385 | 1756 | CTCCGGGCTTCATAGTTCTTTGTAA | Antisense | 914 |
| 201909_at | 474 | 605 | 306 | GACAGGTGAACATTTCCGCCTGGTC | Antisense | 915 |
| 201909_at | 965 | 1077 | 331 | TATGACACCAAGGGCCGTTTTGCTG | Antisense | 916 |
| 201909_at | 628 | 965 | 351 | TGCTGTTCACCGCATCACAGTGGAA | Antisense | 917 |
| 201909_at | 139 | 771 | 442 | GTGACTCATGATGCTCGAACCATCC | Antisense | 918 |
| 201909_at | 383 | 459 | 472 | CCAGATCCTGTCATCAAGGTGAACG | Antisense | 919 |
| 201909_at | 134 | 805 | 570 | GGTGATTGGTGGAGCCAACCTCGGT | Antisense | 920 |
| 201909_at | 543 | 155 | 587 | ACCTCGGTCGTGTTGGTGTGATCAC | Antisense | 921 |
| 201909_at | 156 | 607 | 623 | GACATCCTGGTTCTTTTGATGTGGT | Antisense | 922 |
| 201909_at | 440 | 1151 | 726 | TTGGATTTCCCTGCCCAGGGGAAAG | Antisense | 923 |
| 201909_at | 830 | 795 | 750 | GGGCATTCGACTTACTGTTGCTGAA | Antisense | 924 |
| 201909_at | 904 | 643 | 779 | GAGATAAGAGGCTGGCCACCAAACA | Antisense | 925 |
| 201938_at | 883 | 215 | 1154 | AAACTGTAGTTTGCCTCCAAGACAC | Antisense | 926 |
| 201938_at | 302 | 449 | 1188 | CCTTTAATCTTCTCTTTTGTATACA | Antisense | 927 |
| 201938_at | 230 | 1121 | 1217 | TTACCCATGGTGTTCTTTGTTCCTT | Antisense | 928 |
| 201938_at | 51 | 703 | 1235 | GTTCCTTTTCATAAGCTAATACCAC | Antisense | 929 |
| 201938_at | 238 | 577 | 1277 | GAACGCATATTGACAGCACGCTTTA | Antisense | 930 |
| 201938_at | 639 | 537 | 1292 | GCACGCTTTACTTAGTAGCCGGTTC | Antisense | 931 |
| 201938_at | 376 | 397 | 1311 | CGGTTCCCATTTGCCATACAATGTA | Antisense | 932 |
| 201938_at | 491 | 327 | 1429 | CAGAAGAAAGAGCAACCCACCAAAC | Antisense | 933 |
| 201938_at | 344 | 431 | 1465 | CCCCGAACACTTTCATACTAAGACT | Antisense | 934 |
| 201938_at | 66 | 729 | 1494 | GTAGATCTCAGTTCTGCGTTTATTG | Antisense | 935 |
| 201938_at | 1059 | 221 | 1552 | AAAACTGTTTGCATCTTTGTATGTA | Antisense | 936 |
| 201981_at | 352 | 187 | 9437 | ACAGATTGTTCTCAAGAGGGCCATC | Antisense | 937 |
| 201981_at | 858 | 535 | 9491 | GCACCAACAACTCAACATGGTCATC | Antisense | 938 |
| 201981_at | 846 | 905 | 9528 | TGGTTTTTCCAGCTAGCAGTACTCC | Antisense | 939 |
| 201981_at | 191 | 403 | 9562 | CTGTGACTGGGCAGTGCTTTTCTCT | Antisense | 940 |
| 201981_at | 662 | 991 | 9588 | TCCCATGTCTAGCCTCCAAAAGTTA | Antisense | 941 |
| 201981_at | 732 | 583 | 9616 | GAAAATTAGTCAACTGCACGTGGAA | Antisense | 942 |
| 201981_at | 316 | 465 | 9649 | CCACTTTGGGGATCTCTTTATTTCT | Antisense | 943 |
| 201981_at | 1007 | 639 | 9740 | GAGAGAAGGGTTGAGTGTGGCATAC | Antisense | 944 |
| 201981_at | 1079 | 91 | 9753 | AGTGTGGCATACTTTCTGAAACCTG | Antisense | 945 |
| 201981_at | 836 | 589 | 9770 | GAAACCTGGAGCTGGGAATTGCGGA | Antisense | 946 |
| 201981_at | 696 | 823 | 9803 | GGTCTAGACTAGTTACATCACATAG | Antisense | 947 |
| 202290_at | 1042 | 87 | 267 | AGGGCTCATCGACATCGAGAACCCC | Antisense | 948 |
| 202290_at | 470 | 825 | 318 | GGTCACACAACTGGATCTGGACGGG | Antisense | 949 |
| 202290_at | 672 | 839 | 336 | GGACGGGCCAAAGGAGCTTTCGAGG | Antisense | 950 |
| 202290_at | 567 | 51 | 412 | ATGCACTTGGCCGGGAAGACAGAGC | Antisense | 951 |
| 202290_at | 1035 | 885 | 458 | GGCTGGCCATCATCCGGAAACAGCG | Antisense | 952 |
| 202290_at | 550 | 659 | 484 | GAGGAGGCTGCCCGGAAGAAGGAAG | Antisense | 953 |
| 202290_at | 101 | 211 | 523 | AAAGACGATGCCACATTGTCAGGAA | Antisense | 954 |
| 202290_at | 907 | 861 | 544 | GGAAAACGAATGCAGTCACTCTCCC | Antisense | 955 |
| 202290_at | 601 | 529 | 555 | GCAGTCACTCTCCCTGAATAAGTAA | Antisense | 956 |
| 202290_at | 637 | 1039 | 573 | TAAGTAACTGCGACCCGTGGGAGGA | Antisense | 957 |
| 202290_at | 105 | 813 | 764 | GGGGTAGCTGCTATCTTTGAGACAG | Antisense | 958 |
| 202578_s_at | 668 | 405 | 1831 | CTGGTCACAGTGGTAGTCGCTGGCC | Antisense | 959 |
| 202578_s_at | 612 | 427 | 1864 | CCCTCCTGATTTTGGCTAGGCATCG | Antisense | 960 |
| 202578_s_at | 157 | 371 | 1879 | CTAGGCATCGTGGAACCAGCTCCAG | Antisense | 961 |
| 202578_s_at | 173 | 767 | 1924 | GTGCAGGTTGTGCGGAAGAGGCTGA | Antisense | 962 |
| 202578_s_at | 1161 | 421 | 1967 | CCCACCGCTGTGCATCGAATGAGGG | Antisense | 963 |
| 202578_s_at | 104 | 71 | 2037 | ATGGACCCTTCACAAGTGTTTCTCC | Antisense | 964 |
| 202578_s_at | 828 | 359 | 2077 | CTTCCTTCTCCTGAAATCCAGAGAC | Antisense | 965 |
| 202578_s_at | 1003 | 277 | 2091 | AATCCAGAGACTTTCTTGCTCATCC | Antisense | 966 |
| 202578_s_at | 520 | 591 | 2147 | GAAAGCAGACTTGCATATCCCTGAT | Antisense | 967 |
| 202578_s_at | 306 | 1081 | 2162 | TATCCCTGATGAGCAGCTCGGCTAC | Antisense | 968 |
| 202578_s_at | 560 | 533 | 2174 | GCAGCTCGGCTACTTTTGTAAACTT | Antisense | 969 |
| 202580_x_at | 886 | 1033 | 2815 | TCAATTGACTTCTGTTCCTTGCTTT | Antisense | 970 |
| 202580_x_at | 868 | 253 | 2857 | AAGACCTGCAGTGCACGGTTTCTTC | Antisense | 971 |
| 202580_x_at | 1154 | 409 | 2872 | CGGTTTCTTCCAGGCTGAGGTACCT | Antisense | 972 |
| 202580_x_at | 248 | 657 | 2888 | GAGGTACCTGGATCTTGGGTTCTTC | Antisense | 973 |
| 202580_x_at | 928 | 911 | 2903 | TGGGTTCTTCACTGCAGGGACCCAG | Antisense | 974 |
| 202580_x_at | 913 | 263 | 2930 | AAGTGGATCTGCTTGCCAGAGTCCT | Antisense | 975 |
| 202580_x_at | 416 | 929 | 2981 | TGTTTCCAAGTCAGCTTTCCTGCAA | Antisense | 976 |
| 202580_x_at | 541 | 763 | 3094 | GTGCCCAGATGTGCGCTATTAGATG | Antisense | 977 |
| 202580_x_at | 716 | 669 | 3115 | GATGTTTCTCTGATAATGTCCCCAA | Antisense | 978 |
| 202580_x_at | 526 | 1147 | 3227 | TTGCCCCTCAGCTTTGCAAAGAGCC | Antisense | 979 |
| 202580_x_at | 463 | 461 | 3262 | CCAGCTGACCGCATGGGTGTGAGCC | Antisense | 980 |
| 202727_s_at | 125 | 247 | 1661 | AAGCGTAAAGAGGATGTGTGGCATT | Antisense | 981 |
| 202727_s_at | 763 | 781 | 1676 | GTGTGGCATTTTCACTTTTGGCTTG | Antisense | 982 |
| 202727_s_at | 91 | 879 | 1680 | GGCATTTTCACTTTTGGCTTGTAAA | Antisense | 983 |
| 202727_s_at | 390 | 249 | 1736 | AAGCATTGTAACTTATGAACCTTTA | Antisense | 984 |
| 202727_s_at | 165 | 177 | 1746 | ACTTATGAACCTTTACATCCAGATA | Antisense | 985 |
| 202727_s_at | 2 | 321 | 1761 | CATCCAGATAGGTTACCAGTAACGG | Antisense | 986 |
| 202727_s_at | 820 | 1077 | 1790 | TATCCAGTACTCCTGGTTCCTAGGT | Antisense | 987 |
| 202727_s_at | 668 | 733 | 1796 | GTACTCCTGGTTCCTAGGTGAGCAG | Antisense | 988 |
| 202727_s_at | 858 | 1073 | 1810 | TAGGTGAGCAGGTGATGCCCCAGGG | Antisense | 989 |
| 202727_s_at | 915 | 1099 | 1863 | TTTCTCTGCCTTGGTATAGCATATG | Antisense | 990 |
| 202727_s_at | 832 | 739 | 1894 | GTAAGTTTATGCATACAGTAATTTT | Antisense | 991 |
| 202948_at | 868 | 873 | 4351 | GGCAGCTGGAATTTAAGGAGGGACA | Antisense | 992 |
| 202948_at | 925 | 261 | 4419 | AAGTGCAAAGTTATTCCCCATCTTC | Antisense | 993 |
| 202948_at | 49 | 455 | 4436 | CCATCTTCCAAGGGTTGAATTCTGG | Antisense | 994 |
| 202948_at | 511 | 569 | 4463 | GAAGAAGACACATTCCTAGTTCCCC | Antisense | 995 |
| 202948_at | 84 | 429 | 4485 | CCCGTGAACTTCCTTTGACTTATTG | Antisense | 996 |
| 202948_at | 370 | 1151 | 4499 | TTGACTTATTGTCCCCACTAAAACA | Antisense | 997 |
| 202948_at | 252 | 1101 | 4562 | TTTCTTGCAGTTTTTTTATGGCATT | Antisense | 998 |
| 202948_at | 941 | 209 | 4592 | AAAGATGCCCTAAGTGTTGAAGAAG | Antisense | 999 |
| 202948_at | 737 | 211 | 4835 | AAAGCACCAAATTCATGTACAGCAT | Antisense | 1000 |
| 202948_at | 1035 | 343 | 4848 | CATGTACAGCATGCATCACGGATCA | Antisense | 1001 |
| 202948_at | 30 | 523 | 4860 | GCATCACGGATCAATAGACTGTACT | Antisense | 1002 |
| 203071_at | 600 | 485 | 2404 | GCCCCTGGAGTCGCGGAGAAAGGGC | Antisense | 1003 |
| 203071_at | 1125 | 239 | 2485 | AACGCACTGGTGACCAGACTGTCCC | Antisense | 1004 |
| 203071_at | 78 | 463 | 2509 | CCACGCCGGGAACCAAGCAGGAGAC | Antisense | 1005 |
| 203071_at | 761 | 641 | 2541 | GAGAGAGGAGCCAGACAGACCCTGA | Antisense | 1006 |
| 203071_at | 1040 | 481 | 2584 | GCCGGGCACATTGGGGGTCACCGGC | Antisense | 1007 |
| 203071_at | 947 | 435 | 2608 | CCGATGGAGACACCAACCGACAGGC | Antisense | 1008 |
| 203071_at | 183 | 535 | 2644 | GCAGCTGCGCGGGCTTATTTATTAA | Antisense | 1009 |
| 203071_at | 723 | 681 | 2672 | GATAACCCTTGAATGTAGCAGCCCC | Antisense | 1010 |
| 203071_at | 1112 | 309 | 2707 | CACAGGTCGGGCGCAGGATTCAGCC | Antisense | 1011 |
| 203071_at | 757 | 81 | 2721 | AGGATTCAGCCGGAGGGAAGGGACG | Antisense | 1012 |
| 203071_at | 143 | 463 | 2817 | CCACCTCCTTGGGTAGTGAGCAGTG | Antisense | 1013 |
| 203577_at | 773 | 11 | 1074 | ATTACCGACTGTATGCCTACACGGA | Antisense | 1014 |
| 203577_at | 182 | 1051 | 1091 | TACACGGAGTCGGAGCTGCAGATTG | Antisense | 1015 |
| 203577_at | 448 | 1143 | 1151 | TTCCCCAACATGGTGGTGGCGCAGG | Antisense | 1016 |
| 203577_at | 574 | 533 | 1192 | GCAGCAGGCAATCGCCAGTGGCATC | Antisense | 1017 |
| 203577_at | 1036 | 321 | 1218 | CAGCCCAGCAGATAATCCATTTCCT | Antisense | 1018 |
| 203577_at | 450 | 327 | 1336 | CAGACTCCGGTTCACTGAGGGTGTC | Antisense | 1019 |
| 203577_at | 219 | 655 | 1352 | GAGGGTGTCCTGTATAACCAGTTCC | Antisense | 1020 |
| 203577_at | 559 | 243 | 1367 | AACCAGTTCCTGTCGCAAGTGGACT | Antisense | 1021 |
| 203577_at | 598 | 1139 | 1436 | TTCGAGAACTCGGCCAAGCGGCTCA | Antisense | 1022 |
| 203577_at | 681 | 871 | 1479 | GGCACAGCGACGTCAAGCGCTTTTG | Antisense | 1023 |
| 203577_at | 696 | 505 | 1521 | GCTCCTGAGAGCGCGGGACTTGGAC | Antisense | 1024 |
| 203642_s_at | 174 | 313 | 4261 | CACTTAGTGTGAAAGACTTGCCTTG | Antisense | 1025 |
| 203642_s_at | 75 | 609 | 4275 | GACTTGCCTTGTGTATTCTTTATGT | Antisense | 1026 |
| 203642_s_at | 781 | 315 | 4310 | CACTGTCAATTTTATGGGAAGCTCA | Antisense | 1027 |
| 203642_s_at | 744 | 947 | 4431 | TGACATTGTCACACAGAAATTACAC | Antisense | 1028 |
| 203642_s_at | 791 | 179 | 4454 | ACATTTTATGTGCCAGAAGCCTTAA | Antisense | 1029 |
| 203642_s_at | 231 | 921 | 4462 | TGTGCCAGAAGCCTTAAACATCTTT | Antisense | 1030 |
| 203642_s_at | 1 | 543 | 4706 | GCAAAACAATGCCCATTTGTCGGCT | Antisense | 1031 |
| 203642_s_at | 443 | 277 | 4713 | AATGCCCATTTGTCGGCTTACAGCT | Antisense | 1032 |
| 203642_s_at | 23 | 751 | 4746 | GTCTAGAGCCTGTTGGTGTTCTGTC | Antisense | 1033 |
| 203642_s_at | 220 | 807 | 4760 | GGTGTTCTGTCCCTACTTTAAGAAT | Antisense | 1034 |
| 203642_s_at | 593 | 287 | 4782 | AATTTAATTGCTCACTTATTCTGAA | Antisense | 1035 |
| 203679_at | 457 | 491 | 747 | GCGCTTCTTCCAGGACAAGCGCCCG | Antisense | 1036 |
| 203679_at | 269 | 519 | 834 | GCATATGAGACTTGGGGGTCCCTCC | Antisense | 1037 |
| 203679_at | 1076 | 211 | 879 | AAACGGGAGTGTGCAGTCAGGGCCT | Antisense | 1038 |
| 203679_at | 1101 | 1065 | 963 | TAGAAGGGACGGCTCAGTGGCTGCA | Antisense | 1039 |
| 203679_at | 417 | 617 | 990 | GACGGTCCTGGAAATCTCACATGGT | Antisense | 1040 |
| 203679_at | 1040 | 913 | 1014 | TGGGCACTGCAGCGTTGGAACGTGA | Antisense | 1041 |
| 203679_at | 752 | 899 | 1029 | TGGAACGTGAGCCTCGGATTTCCTG | Antisense | 1042 |
| 203679_at | 674 | 485 | 1054 | GCCCCTCTACTGTAAATGTGCCTTA | Antisense | 1043 |
| 203679_at | 1068 | 887 | 1143 | GGCCCTCCAAGCCAGGTTGAGGTCT | Antisense | 1044 |
| 203679_at | 717 | 889 | 1229 | GGCCCCACACAGGCATGAGGGATGG | Antisense | 1045 |
| 203679_at | 1153 | 891 | 1251 | TGGCCCGGCCAAAGTCTAGGCAGAA | Antisense | 1046 |
| 203756_at | 1068 | 909 | 5721 | TGGGGACCTGTCAGGCTTTGTCATT | Antisense | 1047 |
| 203756_at | 773 | 1097 | 5744 | TTTCCCAGTTTGTTGGTGGTGCCTT | Antisense | 1048 |
| 203756_at | 398 | 761 | 5762 | GTGCCTTTAGTGGTTCCCTAATTTG | Antisense | 1049 |
| 203756_at | 927 | 1155 | 5784 | TTGGGAACACTGATGGGGCCTTGGA | Antisense | 1050 |
| 203756_at | 462 | 957 | 5894 | TGCACTGGCACATATGGTCACCTTG | Antisense | 1051 |
| 203756_at | 899 | 903 | 5917 | TGGAGGGCAGACCTAGGAGCCCCTC | Antisense | 1052 |
| 203756_at | 754 | 79 | 5995 | AGGACCCCCCAAAGCTGAGGGGCTG | Antisense | 1053 |
| 203756_at | 741 | 813 | 6013 | GGGGCTGAATGTAGCCTTTTCAACA | Antisense | 1054 |
| 203756_at | 665 | 269 | 6041 | AAGGCTCCCACTTGAGAGCAGCCTC | Antisense | 1055 |
| 203756_at | 149 | 445 | 6111 | CCTCGCTTCTTCAGCTAAAACTCCA | Antisense | 1056 |
| 203756_at | 118 | 785 | 6197 | GTGGGTCATTGCGGTCTTAGATTAT | Antisense | 1057 |
| 203793_x_at | 373 | 1075 | 1662 | TAGGCATGATTCCAACTGGCTGCAT | Antisense | 1058 |
| 203793_x_at | 746 | 431 | 1771 | CCCCGCGTTGTTGAATGTCCAGAAA | Antisense | 1059 |
| 203793_x_at | 971 | 275 | 1820 | AATGCAGTTTATCCCTGGTTCTGAG | Antisense | 1060 |
| 203793_x_at | 650 | 1069 | 1915 | TAGATAGTTCTGCCTCTTTTTTTTT | Antisense | 1061 |
| 203793_x_at | 1045 | 781 | 1950 | GTGTGTGGCCTTTGCATCATTTATC | Antisense | 1062 |
| 203793_x_at | 573 | 657 | 2002 | GAGGTCTCAGCTCTTGGAGGAGGGC | Antisense | 1063 |
| 203793_x_at | 673 | 241 | 2082 | AACCCTCACTAGCAGGACTGGTGGT | Antisense | 1064 |
| 203793_x_at | 829 | 751 | 2110 | GTCTCACCTGGGGCCTAGAGTGGAA | Antisense | 1065 |
| 203793_x_at | 712 | 809 | 2139 | GGGTGGGTTAACCTCACACAAGCAC | Antisense | 1066 |
| 203793_x_at | 41 | 299 | 2157 | CAAGCACAGATCCCAGACTTTGCCA | Antisense | 1067 |
| 203793_x_at | 989 | 75 | 2183 | AGGCAAACAGGGAATTCCGCCGATA | Antisense | 1068 |
| 203967_at | 467 | 1035 | 2066 | TAATATCTTTGGGTCTTACTATTTT | Antisense | 1069 |
| 203967_at | 1161 | 303 | 2095 | CATAAAAGTGACCAGGTAGACCCTT | Antisense | 1070 |
| 203967_at | 1056 | 1033 | 2122 | TAATTACATTCACTACTTCTACCAC | Antisense | 1071 |
| 203967_at | 584 | 11 | 2129 | ATTCACTACTTCTACCACTTGTGTA | Antisense | 1072 |
| 203967_at | 778 | 149 | 2142 | ACCACTTGTGTATCTCTAGCCAATG | Antisense | 1073 |
| 203967_at | 408 | 723 | 2151 | GTATCTCTAGCCAATGTGCTTGCAA | Antisense | 1074 |
| 203967_at | 922 | 765 | 2166 | GTGCTTGCAAGTGTACAGATCTGTG | Antisense | 1075 |
| 203967_at | 416 | 67 | 2198 | ATGTGTGTATATTTACCTCTTCGTT | Antisense | 1076 |
| 203967_at | 1043 | 1103 | 2209 | TTTACCTCTTCGTTTGCTCAAACAT | Antisense | 1077 |
| 203967_at | 600 | 933 | 2268 | TGTTGTTTTTGAGGCGCGTCTCACC | Antisense | 1078 |
| 203967_at | 950 | 345 | 2549 | CATGCTCAGCCATTAAGGTATTTTG | Antisense | 1079 |
| 203992_s_at | 114 | 77 | 4286 | AGGAAATAACCCAGTTCTGCACCAC | Antisense | 1080 |
| 203992_s_at | 245 | 463 | 4307 | CCACTGGTTTTTGTAGCTATCTCGT | Antisense | 1081 |
| 203992_s_at | 1100 | 367 | 4323 | CTATCTCGTAAGGCTGCTGGCTGAA | Antisense | 1082 |
| 203992_s_at | 261 | 397 | 4343 | CTGAAAACTGTGTCTATGCAACCTT | Antisense | 1083 |
| 203992_s_at | 578 | 543 | 4360 | GCAACCTTCCAAGTGCGGAGTGTCA | Antisense | 1084 |
| 203992_s_at | 92 | 495 | 4374 | GCGGAGTGTCAACCAACTGGACGGG | Antisense | 1085 |
| 203992_s_at | 443 | 411 | 4395 | CGGGAGAGAGTACTGCTCCTACTCC | Antisense | 1086 |
| 203992_s_at | 638 | 373 | 4413 | CTACTCCAGGACTCTCACAAAGCTG | Antisense | 1087 |
| 203992_s_at | 124 | 239 | 4494 | AACTGGCAACATCTTACAGACTACT | Antisense | 1088 |
| 203992_s_at | 416 | 611 | 4512 | GACTACTGACTTGAAGACAACCTCT | Antisense | 1089 |
| 203992_s_at | 711 | 59 | 4754 | ATGATGGTTACACTTTTGGTTCCTA | Antisense | 1090 |
| 204078_at | 1122 | 233 | 2016 | AACTTAAGATGGACACAGCTGACTG | Antisense | 1091 |
| 204078_at | 339 | 111 | 2022 | AGATGGACACAGCTGACTGGACCCC | Antisense | 1092 |
| 204078_at | 40 | 313 | 2091 | CACTTCTATGTCTCTGGACCACAGG | Antisense | 1093 |
| 204078_at | 125 | 871 | 2137 | GGCAAGTGGGCTGATGGGGTCCGCC | Antisense | 1094 |
| 204078_at | 895 | 751 | 2192 | GTCTCCTGGACAAGGAGTTTCCAGC | Antisense | 1095 |
| 204078_at | 470 | 439 | 2196 | CCTGGACAAGGAGTTTCCAGCTGCT | Antisense | 1096 |
| 204078_at | 460 | 885 | 2221 | GGCTGGAGTCTCAGGCCAAATTGCA | Antisense | 1097 |
| 204078_at | 55 | 73 | 2233 | AGGCCAAATTGCAGAGGGTCCTCCA | Antisense | 1098 |
| 204078_at | 1110 | 337 | 2256 | CAGGGTCCTGAAGAGCACTGGACTA | Antisense | 1099 |
| 204078_at | 1062 | 441 | 2262 | CCTGAAGAGCACTGGACTAAGAGTC | Antisense | 1100 |
| 204078_at | 250 | 173 | 2277 | ACTAAGAGTCTAGTGGTTCCAGGGC | Antisense | 1101 |
| 204233_s_at | 172 | 543 | 1157 | GCAAACATCCGGAAGTATCCCACCA | Antisense | 1102 |
| 204233_s_at | 743 | 1079 | 1172 | TATCCCACCAAGAAACAACAGCTCC | Antisense | 1103 |
| 204233_s_at | 950 | 1085 | 1201 | TATTTCCAGTTACTTGCCTGCATTC | Antisense | 1104 |
| 204233_s_at | 431 | 1035 | 1294 | TAATAGGTTTGCCCTTGCATCTCAT | Antisense | 1105 |
| 204233_s_at | 378 | 801 | 1327 | GGGACTGTGGTCCATTGTACAAGCC | Antisense | 1106 |
| 204233_s_at | 60 | 549 | 1367 | GAATTTGGGTACATGGACTACGCCC | Antisense | 1107 |
| 204233_s_at | 307 | 857 | 1381 | GGACTACGCCCAAGCAAGGTTTGAT | Antisense | 1108 |
| 204233_s_at | 803 | 565 | 1426 | GAAGCTTGGGGTGTGACTGTGGGGA | Antisense | 1109 |
| 204233_s_at | 152 | 155 | 1462 | ACCTCATCACTGGACTGCATGGGGA | Antisense | 1110 |
| 204233_s_at | 742 | 789 | 1530 | GTGGCAGGAGGCTTTGGGTGGCTCA | Antisense | 1111 |
| 204233_s_at | 936 | 1091 | 1542 | TTTGGGTGGCTCACTACTGAACACA | Antisense | 1112 |
| 204409_s_at | 697 | 83 | 224 | AGGTTATGCCATATCAGAGGGAAAT | Antisense | 1113 |
| 204409_s_at | 973 | 11 | 281 | ATTATATTGGTTGGTCTACGGGACT | Antisense | 1114 |
| 204409_s_at | 1058 | 819 | 293 | GGTCTACGGGACTATCAGGATAACA | Antisense | 1115 |
| 204409_s_at | 735 | 511 | 353 | GCTAGAAGCCTGAAGGCATATGGCG | Antisense | 1116 |
| 204409_s_at | 929 | 671 | 434 | GATGAAATCCAGTTTGACGATATTG | Antisense | 1117 |
| 204409_s_at | 377 | 93 | 500 | AGTGTTTTTACATGACAAGTTCTCT | Antisense | 1118 |
| 204409_s_at | 183 | 659 | 525 | GAGGATGGTTCTACAGTTGGGATTT | Antisense | 1119 |
| 204409_s_at | 129 | 1159 | 541 | TTGGGATTTTGGCCATCATCAACCA | Antisense | 1120 |
| 204409_s_at | 637 | 197 | 573 | AAATTCATTTAGTGTGTAGTTTCTG | Antisense | 1121 |
| 204409_s_at | 512 | 223 | 719 | AAAAGACCATAATATTTGCTGTTAA | Antisense | 1122 |
| 204409_s_at | 983 | 281 | 748 | AATAAACGAGTGCCTTTCCTACTGT | Antisense | 1123 |
| 204410_at | 165 | 449 | 849 | CCTTTCCTACTGTGATAACGTCAAG | Antisense | 1124 |
| 204410_at | 114 | 553 | 888 | GAATACATTTCTGCCTGATAATCAT | Antisense | 1125 |
| 204410_at | 551 | 971 | 899 | TGCCTGATAATCATGCTGAGTTCTA | Antisense | 1126 |
| 204410_at | 537 | 941 | 915 | TGAGTTCTAATAAGCCCTACTTCCA | Antisense | 1127 |
| 204410_at | 443 | 373 | 931 | CTACTTCCACCTAATCTGTTTACAG | Antisense | 1128 |
| 204410_at | 865 | 715 | 967 | GTTTCAGTTACTTAGATGGTCTCAT | Antisense | 1129 |
| 204410_at | 346 | 667 | 981 | GATGGTCTCATAAGGTTTCTGATAC | Antisense | 1130 |
| 204410_at | 835 | 1017 | 1115 | TCATCCTTTGTGCCTCGGTTATTAA | Antisense | 1131 |
| 204410_at | 807 | 561 | 1223 | GAAACCGAACAATAAGTGGCAACCA | Antisense | 1132 |
| 204410_at | 95 | 859 | 1262 | GGAAATACTGGGGTGCCATTTTGTT | Antisense | 1133 |
| 204410_at | 463 | 1155 | 1302 | TTGTAATCCACTGTTTTGGCTTTCA | Antisense | 1134 |
| 204434_at | 1148 | 279 | 3403 | AATCTTCTATGGCTCTCTTTTTAAT | Antisense | 1135 |
| 204434_at | 981 | 117 | 3543 | AGACCAGCCTAGCAGGGCATTCATC | Antisense | 1136 |
| 204434_at | 1026 | 877 | 3558 | GGCATTCATCTTTGATGTTCTTCCT | Antisense | 1137 |
| 204434_at | 665 | 1023 | 3592 | TCAGAATCGGCAATGCCTGGCCCAC | Antisense | 1138 |
| 204434_at | 94 | 1071 | 3637 | TAGTTTTCCATTTCCAGATTGCGCC | Antisense | 1139 |
| 204434_at | 1150 | 233 | 3677 | AACTCTTTCTAACCAACCGTGATGC | Antisense | 1140 |
| 204434_at | 290 | 51 | 3698 | ATGCCACGTAACTTACCCTATGGAC | Antisense | 1141 |
| 204434_at | 141 | 95 | 3758 | AGTCCAGTGTACCTGTCATCACGGA | Antisense | 1142 |
| 204434_at | 841 | 349 | 3774 | CATCACGGACGCACTGTGGTCACAG | Antisense | 1143 |
| 204434_at | 992 | 283 | 3804 | AATACGAAATACTACAGCCCTGCTC | Antisense | 1144 |
| 204434_at | 299 | 963 | 3824 | TGCTCCCAGGTGTGCATCTTACTGG | Antisense | 1145 |
| 204724_s_at | 432 | 321 | 1896 | CACCAGCAAGGACGGCCAGGACGGT | Antisense | 1146 |
| 204724_s_at | 538 | 145 | 2007 | AGCCTGCCAAGGAGCCGTGTTAGGA | Antisense | 1147 |
| 204724_s_at | 1011 | 595 | 2043 | GAAATCAGGCTCTCGAAGCTCATAA | Antisense | 1148 |
| 204724_s_at | 984 | 569 | 2081 | GAAGCAAGTGACAAGGACGCCCGAA | Antisense | 1149 |
| 204724_s_at | 4 | 619 | 2096 | GACGCCCGAAGCACAGTGGACGGTC | Antisense | 1150 |
| 204724_s_at | 198 | 855 | 2113 | GGACGGTCATGAAGGAGCGGGGGTG | Antisense | 1151 |
| 204724_s_at | 188 | 761 | 2153 | GTCCAGGAGAGGGAGCGCCCCTGGC | Antisense | 1152 |
| 204724_s_at | 537 | 883 | 2232 | GGCTGTCGCCTGACAGCATACCTCA | Antisense | 1153 |
| 204724_s_at | 1032 | 519 | 2247 | GCATACCTCAAAAGGCCCTAGCTAA | Antisense | 1154 |
| 204724_s_at | 790 | 833 | 2323 | GGTTGTGTACAACTCCACGAGGTGA | Antisense | 1155 |
| 204724_s_at | 617 | 1045 | 2383 | TAAAGACTATGATCTCATCCCAATA | Antisense | 1156 |
| 204778_x_at | 415 | 437 | 338 | CCGGCTATGGGCTCGAGCCGAGTTC | Antisense | 1157 |
| 204778_x_at | 152 | 793 | 435 | GGGCGCCAAGGAGCAGAGGGACTCG | Antisense | 1158 |
| 204778_x_at | 177 | 857 | 453 | GGACTCGGACTTGGCGGCCGAGAGT | Antisense | 1159 |
| 204778_x_at | 550 | 889 | 468 | GGCCGAGAGTAACTTCCGGATCTAC | Antisense | 1160 |
| 204778_x_at | 155 | 1009 | 488 | TCTACCCCTGGATGCGAAGCTCAGG | Antisense | 1161 |
| 204778_x_at | 201 | 341 | 509 | CAGGAACTGACCGCAAACGAGGCCG | Antisense | 1162 |
| 204778_x_at | 569 | 417 | 547 | CGCTACCAGACCCTGGAGCTGGAGA | Antisense | 1163 |
| 204778_x_at | 1042 | 127 | 573 | AGAATTTCACTACAATCGCTACCTG | Antisense | 1164 |
| 204778_x_at | 714 | 161 | 628 | ACGCTCTGCCTCACGGAAAGACAGA | Antisense | 1165 |
| 204778_x_at | 1099 | 147 | 718 | ACCACCGGCCAAGACAGGGCTGAAG | Antisense | 1166 |
| 204778_x_at | 196 | 489 | 817 | GCCCAGCTCTGGGAACTGAATCAGG | Antisense | 1167 |
| 204897_at | 294 | 133 | 3030 | AGCAGCTTATTGTTTCTCTGAAAGT | Antisense | 1168 |
| 204897_at | 401 | 71 | 3112 | ATGGCAAGTTGCATCAGAAAGCTTT | Antisense | 1169 |
| 204897_at | 1120 | 685 | 3154 | GATTCCCAAACGTGGTTACATTAGC | Antisense | 1170 |
| 204897_at | 736 | 239 | 3162 | AACGTGGTTACATTAGCCATTCATG | Antisense | 1171 |
| 204897_at | 267 | 475 | 3177 | GCCATTCATGTATGTCAGAAGTGCA | Antisense | 1172 |
| 204897_at | 1002 | 909 | 3206 | TGGGGCACTTAATGGTCACCTTGTA | Antisense | 1173 |
| 204897_at | 560 | 735 | 3228 | GTAACAGTTTTGTGTAACTCCCAGT | Antisense | 1174 |
| 204897_at | 102 | 739 | 3241 | GTAACTCCCAGTGATGCTGTACACA | Antisense | 1175 |
| 204897_at | 629 | 499 | 3256 | GCTGTACACATATTTGAAGGGTCTT | Antisense | 1176 |
| 204897_at | 692 | 777 | 3315 | GTGTTTTTGTGAATTGCTTGGTTGT | Antisense | 1177 |
| 204897_at | 1018 | 197 | 3344 | AAATTCTGAGCCTGATATTGATATG | Antisense | 1178 |
| 204921_at | 539 | 489 | 2633 | GCCCACTGCCTAAATGATGCCCGGC | Antisense | 1179 |
| 204921_at | 691 | 529 | 2674 | GCAGATCCCAGTGAGTCATGAGCCT | Antisense | 1180 |
| 204921_at | 618 | 65 | 2735 | ATGTGGGTAGAAGCTTTCCTGCCCC | Antisense | 1181 |
| 204921_at | 59 | 379 | 2766 | CTCTAGTAGCCCTCAGTGTCGAAGG | Antisense | 1182 |
| 204921_at | 977 | 561 | 2786 | GAAGGTGAGCTTGTAGGTGCCTGCC | Antisense | 1183 |
| 204921_at | 884 | 621 | 2831 | GACCATCTGGGTCTGTGTAGCTGGG | Antisense | 1184 |
| 204921_at | 562 | 113 | 2872 | AGAGATGGGGACCAGAAGCCCCCCA | Antisense | 1185 |
| 204921_at | 522 | 443 | 2942 | CCTGCCACCTGTCAGACTTGGGTGA | Antisense | 1186 |
| 204921_at | 137 | 93 | 2975 | AGTGAGGCTGTTAGGTCCTGCAGTT | Antisense | 1187 |
| 204921_at | 664 | 701 | 2997 | GTTCCAGAGCAGTCTAGGGACACCA | Antisense | 1188 |
| 204921_at | 990 | 149 | 3018 | ACCACTGCCCTGTCTTTAGGAAATC | Antisense | 1189 |
| 204947_at | 859 | 401 | 1935 | CTGGCTGGGCGTGTAGGACGGTGAG | Antisense | 1190 |
| 204947_at | 879 | 1073 | 1948 | TAGGACGGTGAGAGCACTTCTGTCT | Antisense | 1191 |
| 204947_at | 1009 | 13 | 2010 | ATTTATTTATCGAGGCCTCTTTGGT | Antisense | 1192 |
| 204947_at | 268 | 387 | 2087 | CTCCCTCTACCCTTGAGCAAGGGCA | Antisense | 1193 |
| 204947_at | 807 | 863 | 2147 | GGAACTGAGGCCTGGGTGATTTATT | Antisense | 1194 |
| 204947_at | 1066 | 613 | 2198 | GACTGACTGACAGCCATGGGTGGTC | Antisense | 1195 |
| 204947_at | 404 | 815 | 2216 | GGTGGTCAGATGGTGGGGTGGGCCC | Antisense | 1196 |
| 204947_at | 990 | 503 | 2267 | GCTGCCCCCCAGGATGGATATGAGA | Antisense | 1197 |
| 204947_at | 523 | 907 | 2305 | TGGGGGACCTTCACTGATGTGGGCA | Antisense | 1198 |
| 204947_at | 832 | 159 | 2417 | ACCCTCCAATCTGCACTTTGATTTG | Antisense | 1199 |
| 204947_at | 249 | 935 | 2435 | TGATTTGCTTCCTAACAGCTCTGTT | Antisense | 1200 |
| 205000_at | 537 | 1039 | 3978 | TAAGCAGACCCGGCATTGGCAATGT | Antisense | 1201 |
| 205000_at | 127 | 879 | 3989 | GGCATTGGCAATGTAGCTGTAATTT | Antisense | 1202 |
| 205000_at | 1027 | 1099 | 4138 | TTTCTCTTGAGTTTTGTTATGTGTT | Antisense | 1203 |
| 205000_at | 813 | 693 | 4184 | GATTGTCTGGTATATTTACAGTCCT | Antisense | 1204 |
| 205000_at | 277 | 1103 | 4198 | TTTACAGTCCTCAAACATGGTTATT | Antisense | 1205 |
| 205000_at | 804 | 231 | 4211 | AACATGGTTATTTCTGTCAGTGACT | Antisense | 1206 |
| 205000_at | 437 | 233 | 4237 | AACATTCGGTTTTACCAGCCAGCAG | Antisense | 1207 |
| 205000_at | 507 | 151 | 4250 | ACCAGCCAGCAGTATTCTTCAGTAA | Antisense | 1208 |
| 205000_at | 306 | 281 | 4299 | AATCATTGAACCTCGAGTCACTGTA | Antisense | 1209 |
| 205000_at | 45 | 1087 | 4346 | TATTAGTTTTAGATGCTGGCACCGC | Antisense | 1210 |
| 205000_at | 106 | 873 | 4363 | GGCACCGCATGTGCTCTGTTTATTC | Antisense | 1211 |
| 205001_s_at | 796 | 127 | 1772 | AGAAGTGCCTTCTTGGTTGGAAAAT | Antisense | 1212 |
| 205001_s_at | 323 | 297 | 1817 | CAAGGGTGGCAGTCGTGGACGATCT | Antisense | 1213 |
| 205001_s_at | 321 | 691 | 1852 | GATTCAGTGGAGGATTTGGTGCCAG | Antisense | 1214 |
| 205001_s_at | 909 | 1079 | 1881 | TATCGACAAAGTAGTGGTTCCAGCA | Antisense | 1215 |
| 205001_s_at | 173 | 881 | 1911 | GGCTTTGGTGCTAGTCGCGGAAGCA | Antisense | 1216 |
| 205001_s_at | 122 | 881 | 1989 | GGCTATGGAGGCTTCTACAATAGTG | Antisense | 1217 |
| 205001_s_at | 1122 | 813 | 2056 | GGGGCAACTGAATCTGCTTTGCAGC | Antisense | 1218 |
| 205001_s_at | 550 | 367 | 2072 | CTTTGCAGCAAAGTCACCCTTACAA | Antisense | 1219 |
| 205001_s_at | 1015 | 497 | 2173 | GCTGTGATTCTCCTGATAATTCAAG | Antisense | 1220 |
| 205001_s_at | 846 | 1 | 2188 | ATAATTCAAGGGAGCTCAAAGTCAC | Antisense | 1221 |
| 205001_s_at | 442 | 109 | 2265 | AGATGTAATTGCTCTAGTTTGGATT | Antisense | 1222 |
| 205027_s_at | 290 | 15 | 2203 | ATTATATAACTCTTTGAGCCTTTAT | Antisense | 1223 |
| 205027_s_at | 997 | 625 | 2218 | GAGCCTTTATTGGTAAATTCTGGTA | Antisense | 1224 |
| 205027_s_at | 81 | 287 | 2260 | AATTTGGGTGACTAGAACAACTTGA | Antisense | 1225 |
| 205027_s_at | 652 | 729 | 2290 | GTAGCAATAAGCTGGACTAGTGTCC | Antisense | 1226 |
| 205027_s_at | 158 | 779 | 2309 | GTGTCCTAAAAATGGCTAACTGATG | Antisense | 1227 |
| 205027_s_at | 956 | 769 | 2364 | GTGACAGTTTCTTTTGTGTTCCTAT | Antisense | 1228 |
| 205027_s_at | 91 | 703 | 2381 | GTTCCTATGGAAACATTTTATACTG | Antisense | 1229 |
| 205027_s_at | 38 | 917 | 2599 | TGTGTATGTTTTATATCAAATGCCT | Antisense | 1230 |
| 205027_s_at | 22 | 1031 | 2614 | TCAAATGCCTTCATGAATCTTTCAT | Antisense | 1231 |
| 205027_s_at | 667 | 215 | 2712 | AAACCCAATACTTTTGTCCAATGTG | Antisense | 1232 |
| 205027_s_at | 1156 | 175 | 2721 | ACTTTTGTCCAATGTGGTTGGTCAA | Antisense | 1233 |
| 205105_at | 701 | 177 | 3547 | ACTTCTTCTCTCATGAATCATCCAG | Antisense | 1234 |
| 205105_at | 579 | 197 | 3585 | AAATAAGTTCTCACCTACCCTTGAG | Antisense | 1235 |
| 205105_at | 317 | 629 | 3607 | GAGCTGCAAGGTGAATTCTCTCCAT | Antisense | 1236 |
| 205105_at | 581 | 389 | 3626 | CTCCATTACAGTCATCTTTGCCTTG | Antisense | 1237 |
| 205105_at | 516 | 1147 | 3643 | TTGCCTTGTGACATTCATCTGGTTA | Antisense | 1238 |
| 205105_at | 830 | 67 | 3698 | ATGGGCACTCCAATGAGGCAGCCTT | Antisense | 1239 |
| 205105_at | 388 | 263 | 3737 | AAGGGTTTGATTGTCGGTTCTCTAG | Antisense | 1240 |
| 205105_at | 1013 | 89 | 3771 | AGGGCTGTTTTGTTCTACTACTCAG | Antisense | 1241 |
| 205105_at | 1113 | 921 | 3834 | TGTCGAAAGTCTCACACCTTCATCA | Antisense | 1242 |
| 205105_at | 25 | 1029 | 3856 | TCACTATCCTTGATGCATTCACCTC | Antisense | 1243 |
| 205105_at | 260 | 355 | 3983 | CATTGGCTTTTATACCTTTCTTGGT | Antisense | 1244 |
| 205204_at | 363 | 109 | 167 | AGATCCGAGTGCACTCGCGAGGCAA | Antisense | 1245 |
| 205204_at | 229 | 463 | 200 | CCACCGGTCACTTCATGGGCAAGAA | Antisense | 1246 |
| 205204_at | 297 | 801 | 281 | GGGACCAGCGACTGCAGCTGAGTCA | Antisense | 1247 |
| 205204_at | 580 | 649 | 300 | GAGTCATGATCTGCTCGGAATCCTC | Antisense | 1248 |
| 205204_at | 324 | 963 | 311 | TGCTCGGAATCCTCCTGCTAAAGAA | Antisense | 1249 |
| 205204_at | 608 | 535 | 364 | GCACCCCAAATCCAGTACAGGAGGC | Antisense | 1250 |
| 205204_at | 882 | 1073 | 424 | TAGGGGCAGACACAACAGCGTGGCT | Antisense | 1251 |
| 205204_at | 829 | 141 | 440 | AGCGTGGCTTAGATTGTGCCCACCC | Antisense | 1252 |
| 205204_at | 311 | 763 | 455 | GTGCCCACCCAGGGAAGGTGCTGAA | Antisense | 1253 |
| 205204_at | 1159 | 951 | 476 | TGAATGGGACCCTGTTGATGGCCCC | Antisense | 1254 |
| 205204_at | 541 | 279 | 525 | AATCTCTGTTACTCCATTACTGTGA | Antisense | 1255 |
| 205419_at | 665 | 323 | 1055 | CAGCCCCTGAAGAAAATTCACGTGA | Antisense | 1256 |
| 205419_at | 139 | 671 | 1095 | GATGATGATACATTCCAAGTCTTCA | Antisense | 1257 |
| 205419_at | 477 | 599 | 1171 | GACAAACTTTGCAGGACTTCCCTTA | Antisense | 1258 |
| 205419_at | 288 | 525 | 1181 | GCAGGACTTCCCTTATAAAGCAAAA | Antisense | 1259 |
| 205419_at | 1029 | 705 | 1211 | GTTCAGCTTCCAATTAGTATTCTTT | Antisense | 1260 |
| 205419_at | 465 | 1085 | 1236 | TATATTTCTTTCATTGGGCGCTTTC | Antisense | 1261 |
| 205419_at | 228 | 365 | 1256 | CTTTCCCATCTCCAACTCGGAAGTA | Antisense | 1262 |
| 205419_at | 104 | 565 | 1275 | GAAGTAAGCCCAAGAGAACAACATA | Antisense | 1263 |
| 205419_at | 952 | 551 | 1361 | GAATACACCAAAAGGAGGCGCTCTT | Antisense | 1264 |
| 205419_at | 451 | 1 | 1526 | AAATCCAAATTTCTCTCAATGTTAG | Antisense | 1265 |
| 205419_at | 469 | 649 | 1550 | GATTTAATTCCCTCAATAACACCAA | Antisense | 1266 |
| 205421_at | 282 | 293 | 2625 | CAATTCCTATTCATTCTTAGCACTT | Antisense | 1267 |
| 205421_at | 664 | 1133 | 2638 | TTCTTAGCACTTTGACATGTCTTGG | Antisense | 1268 |
| 205421_at | 242 | 593 | 2690 | GAAAGATCAATTATATCCATGCTTA | Antisense | 1269 |
| 205421_at | 450 | 515 | 2710 | GCTTAACAGGATCAGCAGGAGCTTT | Antisense | 1270 |
| 205421_at | 226 | 1033 | 2755 | TAATAAGGGATTGATCTTTCTTTTT | Antisense | 1271 |
| 205421_at | 515 | 1011 | 2773 | TCTTTTTTTGTTATCGAGGCTTTTG | Antisense | 1272 |
| 205421_at | 1119 | 781 | 2811 | GTGTGTTCTGCTTTATATGTTATAT | Antisense | 1273 |
| 205421_at | 615 | 1033 | 2836 | TCAATATCTTTTCAGATGCAGTCTA | Antisense | 1274 |
| 205421_at | 461 | 673 | 2850 | GATGCAGTCTATATTTTATGCTGAG | Antisense | 1275 |
| 205421_at | 1010 | 285 | 2972 | AATATACACATGTCGCGTAATCGTA | Antisense | 1276 |
| 205421_at | 572 | 943 | 3000 | TGAGCATCTTAGTCTTTAAAACACA | Antisense | 1277 |
| 205447_s_at | 697 | 483 | 2234 | GCCGTCACCCGAAGTCAGAAACGTG | Antisense | 1278 |
| 205447_s_at | 699 | 1027 | 2351 | TCACTATCTACCTTCAGCTCAGAGA | Antisense | 1279 |
| 205447_s_at | 985 | 267 | 2394 | AAGGCACAGCTAGTGAACCTTCCCC | Antisense | 1280 |
| 205447_s_at | 980 | 429 | 2416 | CCCCAGTGGCACACCTGAAGTTGGC | Antisense | 1281 |
| 205447_s_at | 530 | 533 | 2439 | GCAGCACCAACACTGATGAGCGGCC | Antisense | 1282 |
| 205447_s_at | 195 | 627 | 2468 | GAGCGGTCTGATGACATGTGCTCCC | Antisense | 1283 |
| 205447_s_at | 61 | 337 | 2492 | CAGGGCTCAGAAATCCCACTGGACC | Antisense | 1284 |
| 205447_s_at | 467 | 453 | 2562 | CCATTCCACACCAGGAACTTCTCAG | Antisense | 1285 |
| 205447_s_at | 971 | 485 | 2595 | GCCCTCCCAATTCTGAGGACTCAGA | Antisense | 1286 |
| 205447_s_at | 109 | 171 | 2643 | ACTCCAACAGCGTTGATGCCTTGCG | Antisense | 1287 |
| 205447_s_at | 785 | 949 | 2690 | TGAAAGCCACTCGTATTCCTTGTAC | Antisense | 1288 |
| 205518_s_at | 831 | 1027 | 1672 | TCAAGAATTCACTGATCTGATGCAA | Antisense | 1289 |
| 205518_s_at | 760 | 1079 | 1707 | TATCATTACATCTTGAACCCAGGAA | Antisense | 1290 |
| 205518_s_at | 705 | 1 | 1769 | ATAGATAATTCCACGTTGCCTTTGT | Antisense | 1291 |
| 205518_s_at | 470 | 163 | 1781 | ACGTTGCCTTTGTGATTTGTATATA | Antisense | 1292 |
| 205518_s_at | 429 | 23 | 1846 | ATATTTTACTTGTTCCATCCACAGT | Antisense | 1293 |
| 205518_s_at | 1070 | 1145 | 1858 | TTCCATCCACAGTTCTCTACAGAAA | Antisense | 1294 |
| 205518_s_at | 583 | 271 | 2006 | AATGGTCTGTTTTCGTGATATTCGT | Antisense | 1295 |
| 205518_s_at | 962 | 707 | 2070 | GTTAACTAGCATTCTGTTTTACATG | Antisense | 1296 |
| 205518_s_at | 263 | 345 | 2091 | CATGTTGACATTTCTAACACACACA | Antisense | 1297 |
| 205518_s_at | 1128 | 307 | 2108 | CACACACACCACTGATTTGAACTTC | Antisense | 1298 |
| 205518_s_at | 818 | 21 | 2151 | ATATATGCTAGGTCTGATTCTGAAG | Antisense | 1299 |
| 205668_at | 791 | 863 | 6476 | GGAACTCTAAACCTTGTGATGACTA | Antisense | 1300 |
| 205668_at | 475 | 37 | 6550 | ATCACTTTAAGTTTTGACACCTAGA | Antisense | 1301 |
| 205668_at | 859 | 749 | 6580 | GTCTTAGTAATAGCATCCACTGGAA | Antisense | 1302 |
| 205668_at | 914 | 1021 | 6623 | TCAGCATTTAACTTACATTTGTACT | Antisense | 1303 |
| 205668_at | 496 | 1105 | 6739 | TTTATATAGTCTACAGTTGTCCTGA | Antisense | 1304 |
| 205668_at | 868 | 105 | 6753 | AGTTGTCCTGATTTCTTATTGAATT | Antisense | 1305 |
| 205668_at | 328 | 551 | 6773 | GAATTTGTTAGACTAGTTCTCTTGT | Antisense | 1306 |
| 205668_at | 85 | 705 | 6788 | GTTCTCTTGTCTTGTGATCTGTGTA | Antisense | 1307 |
| 205668_at | 695 | 1103 | 6817 | TTTAGTCACTAAGACTTTCCTCCAA | Antisense | 1308 |
| 205668_at | 422 | 1097 | 6832 | TTTCCTCCAAGAACTAAGCCAACTT | Antisense | 1309 |
| 205668_at | 261 | 165 | 6869 | ACGGCTGTATATAATGGTGATGTCA | Antisense | 1310 |
| 205841_at | 615 | 41 | 4627 | ATCTATTTTATTATGGTTTCCCTTG | Antisense | 1311 |
| 205841_at | 296 | 829 | 4641 | GGTTTCCCTTGTATCTATTTGTGGT | Antisense | 1312 |
| 205841_at | 274 | 611 | 4707 | GACTACTATGAACAGTTTTCTTTTA | Antisense | 1313 |
| 205841_at | 237 | 53 | 4749 | ATGCCAGGAATATTGTCATCCTTTG | Antisense | 1314 |
| 205841_at | 582 | 613 | 4781 | GACTGCCAATAACATTCTTCGATCT | Antisense | 1315 |
| 205841_at | 937 | 33 | 4789 | ATAACATTCTTCGATCTCTGGGATT | Antisense | 1316 |
| 205841_at | 105 | 679 | 4801 | GATCTCTGGGATTTATGCTCATGAA | Antisense | 1317 |
| 205841_at | 770 | 837 | 4875 | GGATAGCTCATTAAGAAGTGCAGCA | Antisense | 1318 |
| 205841_at | 1018 | 93 | 4891 | AGTGCAGCAGGTTAAGAATTTTTTC | Antisense | 1319 |
| 205841_at | 949 | 549 | 4906 | GAATTTTTTCCTAAAGACTGTATAT | Antisense | 1320 |
| 205841_at | 610 | 583 | 5050 | GAAAATTCATAACGTGTATCTTTAA | Antisense | 1321 |
| 205856_at | 565 | 595 | 2175 | GAAATACTCAGCTTAGGCATTTTTA | Antisense | 1322 |
| 205856_at | 833 | 959 | 2236 | TGCATAGAATTGTTACCAACCTCCA | Antisense | 1323 |
| 205856_at | 224 | 929 | 2246 | TGTTACCAACCTCCAAAGGGCTCTT | Antisense | 1324 |
| 205856_at | 508 | 305 | 2259 | CAAAGGGCTCTTTAAAATCATATTT | Antisense | 1325 |
| 205856_at | 420 | 1087 | 2287 | TATTCATTTGAGGATGTCTTATAAA | Antisense | 1326 |
| 205856_at | 1144 | 83 | 2324 | AGGTCAGAATGCTTACGGGTGTTAT | Antisense | 1327 |
| 205856_at | 990 | 325 | 2328 | CAGAATGCTTACGGGTGTTATTTTT | Antisense | 1328 |
| 205856_at | 55 | 1039 | 2354 | TAAGTTGTTGAATTCCTTAATTTAG | Antisense | 1329 |
| 205856_at | 1136 | 507 | 2383 | GCTCATTATTTTTTGCACACTCACA | Antisense | 1330 |
| 205856_at | 807 | 1135 | 2411 | TTCTCTCTCAGAAATCAATGGCATT | Antisense | 1331 |
| 205856_at | 963 | 1029 | 2425 | TCAATGGCATTTGAACCACCAAAAA | Antisense | 1332 |
| 205987_at | 519 | 461 | 720 | CCAGCTGTTGCTGGTTTGTCATGCC | Antisense | 1333 |
| 205987_at | 890 | 849 | 795 | GGAGCAACTGGGCACTAAACATGGT | Antisense | 1334 |
| 205987_at | 785 | 495 | 889 | GCTGGCCTGTCTTGTCGAGTGAGAC | Antisense | 1335 |
| 205987_at | 1067 | 475 | 979 | GCCTTGGTAGTGATAGTGCCCTTGG | Antisense | 1336 |
| 205987_at | 600 | 763 | 994 | GTGCCCTTGGTGATTCTAATAGTCC | Antisense | 1337 |
| 205987_at | 1044 | 569 | 1035 | GAAGCACTGCTCATATCAGGACATC | Antisense | 1338 |
| 205987_at | 992 | 1019 | 1050 | TCAGGACATCCTGTGAGACTCTTCC | Antisense | 1339 |
| 205987_at | 702 | 945 | 1078 | TGACTCCCCCATTGTGTTAAGAACC | Antisense | 1340 |
| 205987_at | 679 | 455 | 1102 | CCAGCAACCCAGGAGCCTAGTACAA | Antisense | 1341 |
| 205987_at | 674 | 285 | 1125 | AATATAGTGATGCCATCCCGTCGAC | Antisense | 1342 |
| 205987_at | 992 | 435 | 1142 | CCGTCGACTCTCCATTTAAATTGTT | Antisense | 1343 |
| 205997_at | 57 | 665 | 2202 | GATGGTAAAGGCTGTTCAACCCCAA | Antisense | 1344 |
| 205997_at | 488 | 499 | 2212 | GCTGTTCAACCCCAAGAGATGAGTC | Antisense | 1345 |
| 205997_at | 841 | 649 | 2232 | GAGTCAGATGAAGCCCCATGTGTAT | Antisense | 1346 |
| 205997_at | 110 | 425 | 2246 | CCCATGTGTATGATCTGCCAGTAGA | Antisense | 1347 |
| 205997_at | 628 | 473 | 2262 | GCCAGTAGAAGGCAATGAGCCCCCA | Antisense | 1348 |
| 205997_at | 849 | 349 | 2296 | CATAAAGACACAAACGCACTTCCCC | Antisense | 1349 |
| 205997_at | 894 | 837 | 2334 | GGATAATCCAATGTCTACACCTAAG | Antisense | 1350 |
| 205997_at | 719 | 751 | 2346 | GTCTACACCTAAGGACTCAAATCCA | Antisense | 1351 |
| 205997_at | 23 | 1055 | 2455 | TACTATCTCACCAGTATTTGCTCTC | Antisense | 1352 |
| 205997_at | 768 | 721 | 2468 | GTATTTGCTCTCGACTCAAGAAGGT | Antisense | 1353 |
| 205997_at | 257 | 581 | 2548 | GAACATATGCCTGAGAACCTTTGCA | Antisense | 1354 |
| 206118_at | 674 | 501 | 2008 | GCTGACATCCTGCGAGACTACAAAG | Antisense | 1355 |
| 206118_at | 1162 | 905 | 2052 | TCCTGAAAACCCTCTGAAGTACCTA | Antisense | 1356 |
| 206118_at | 413 | 565 | 2067 | GAAGTACCTATATCCTGACATTCCC | Antisense | 1357 |
| 206118_at | 568 | 303 | 2097 | CAAAGCCTTCGGTAAACACTACAGC | Antisense | 1358 |
| 206118_at | 459 | 507 | 2120 | GCTCTCAGCCTTGCGAAGTTTCAAG | Antisense | 1359 |
| 206118_at | 553 | 987 | 2189 | TCCCCATCTCAACAATCCGAAGTGA | Antisense | 1360 |
| 206118_at | 103 | 215 | 2283 | AAACCTGAGTCCCACAACAATTGAA | Antisense | 1361 |
| 206118_at | 116 | 955 | 2310 | TGCAATGAAGTCTCCTTATTCTGCT | Antisense | 1362 |
| 206118_at | 52 | 121 | 2390 | AGACTGTTCTTTGCCCAATAACCAC | Antisense | 1363 |
| 206118_at | 366 | 607 | 2461 | GACATCTGAAGCTCTCTTCACACTC | Antisense | 1364 |
| 206118_at | 787 | 989 | 2484 | TCCCGTGGCACTCCTCAATTGGGAG | Antisense | 1365 |
| 206618_at | 1048 | 569 | 2935 | GAAGCATATCCAGAGGGCGAAAGAT | Antisense | 1366 |
| 206618_at | 622 | 885 | 2950 | GGCGAAAGATATCTCTCCATTGTGC | Antisense | 1367 |
| 206618_at | 25 | 349 | 2974 | CATCTGCCTCTTTTGACGTTGGAAG | Antisense | 1368 |
| 206618_at | 812 | 865 | 2994 | GGAAGACACATGTCTTACTCCCCAA | Antisense | 1369 |
| 206618_at | 498 | 1057 | 3009 | TACTCCCCAAAGGGAGCCCAGCACT | Antisense | 1370 |
| 206618_at | 317 | 853 | 3035 | GGAGCCTTCTTGATGATCTCAAAAA | Antisense | 1371 |
| 206618_at | 3 | 771 | 3086 | GTGACTGTGAAACCGTCAGTTCGGA | Antisense | 1372 |
| 206618_at | 182 | 589 | 3094 | GAAACCGTCAGTTCGGAAGGCTGGT | Antisense | 1373 |
| 206618_at | 601 | 559 | 3109 | GAAGGCTGGTTAGAACATGTGGGAG | Antisense | 1374 |
| 206618_at | 804 | 765 | 3253 | GTGCTTACAATTTTGTGTACCAACT | Antisense | 1375 |
| 206618_at | 118 | 689 | 3364 | GATTTCATTGCTATTGCATAGTCTC | Antisense | 1376 |
| 206637_at | 64 | 945 | 1936 | TGAGCCTGGGGTTCTGGTGTTAGAA | Antisense | 1377 |
| 206637_at | 1091 | 1089 | 1995 | TATTGGCATACGTTATCAGCAACTT | Antisense | 1378 |
| 206637_at | 1051 | 173 | 2016 | ACTTCCCCTGTTCAATAGTATGGGA | Antisense | 1379 |
| 206637_at | 69 | 309 | 2065 | CACACCCACACCGTAGAACATATAT | Antisense | 1380 |
| 206637_at | 1031 | 307 | 2204 | CACACATCACATTTTTCTGGAAAAC | Antisense | 1381 |
| 206637_at | 1129 | 615 | 2230 | GACGGATTTTACTTCTGGAGACATG | Antisense | 1382 |
| 206637_at | 150 | 637 | 2247 | GAGACATGGCATACGGTTACTGACT | Antisense | 1383 |
| 206637_at | 148 | 707 | 2262 | GTTACTGACTTATGAGCTACCAAAA | Antisense | 1384 |
| 206637_at | 578 | 1099 | 2295 | TTTCTCTGCTATTAACTGGCTAGAA | Antisense | 1385 |
| 206637_at | 119 | 127 | 2316 | AGAAGACATTCATCTATTTTTCAAA | Antisense | 1386 |
| 206637_at | 525 | 719 | 2370 | GTTTGTATCTATTTCATGCTTTACT | Antisense | 1387 |
| 206700_s_at | 79 | 1013 | 4952 | TCTTAAATCCTACTATCTCCTGGCC | Antisense | 1388 |
| 206700_s_at | 750 | 387 | 4968 | CTCCTGGCCTGGACCTCAGAAGGAG | Antisense | 1389 |
| 206700_s_at | 317 | 851 | 4989 | GGAGCTTTTTGCCTATCTATAATTT | Antisense | 1390 |
| 206700_s_at | 918 | 973 | 5019 | TGCCAATTTTTGATATCCTCTCTCC | Antisense | 1391 |
| 206700_s_at | 581 | 309 | 5078 | CACACCCCGATGCTCAGAAGTGTCT | Antisense | 1392 |
| 206700_s_at | 543 | 563 | 5094 | GAAGTGTCTTGCCAGCAACATTCCT | Antisense | 1393 |
| 206700_s_at | 1115 | 843 | 5130 | GGAGTGATTTCCTAAACCAGTTTCA | Antisense | 1394 |
| 206700_s_at | 741 | 489 | 5191 | GCCCAAGTGCGTACCTTTATTTTTG | Antisense | 1395 |
| 206700_s_at | 626 | 425 | 5225 | CCCTCTTTCTGTACTTCAATTTTTG | Antisense | 1396 |
| 206700_s_at | 794 | 819 | 5289 | GGTGCTTCAAAACTTGTACCTTCAT | Antisense | 1397 |
| 206700_s_at | 1014 | 57 | 5409 | ATGACTCTACCTGTGGTCTATCTTT | Antisense | 1398 |
| 207063_at | 609 | 931 | 937 | TGTTGGGAATTGGTACTGGCTAGAA | Antisense | 1399 |
| 207063_at | 768 | 1093 | 1025 | TTTGACAGCCACAGCATGTTCCGAA | Antisense | 1400 |
| 207063_at | 717 | 697 | 1121 | GTTGTACAACATGCCCTACAGCTAC | Antisense | 1401 |
| 207063_at | 899 | 373 | 1136 | CTACAGCTACTCTTTAAATCTCCAA | Antisense | 1402 |
| 207063_at | 182 | 559 | 1222 | GAATGGGATGAGCACTCCTACAAAA | Antisense | 1403 |
| 207063_at | 1040 | 265 | 1246 | AAGGATTCCAGAGAGCTCGCTTGCT | Antisense | 1404 |
| 207063_at | 564 | 593 | 1318 | GAAAGTGGGTCCCCACCAGACATTG | Antisense | 1405 |
| 207063_at | 284 | 121 | 1335 | AGACATTGAATCTGCCGCATCTTGA | Antisense | 1406 |
| 207063_at | 712 | 391 | 1346 | CTGCCGCATCTTGATACTGGACTTC | Antisense | 1407 |
| 207063_at | 780 | 1113 | 1407 | TTATTACCTGTCCAGTATCTTTGGT | Antisense | 1408 |
| 207063_at | 470 | 585 | 1461 | GAAAACACCAGAGGCCATACCTAAT | Antisense | 1409 |
| 207651_at | 757 | 1147 | 828 | TTGCCTTGTAATTCGACAGCTCTAC | Antisense | 1410 |
| 207651_at | 1133 | 175 | 906 | ACTTTTAGTGACCACGGGCTACATC | Antisense | 1411 |
| 207651_at | 103 | 795 | 921 | GGGCTACATCATATGCTTTGTTCCT | Antisense | 1412 |
| 207651_at | 23 | 31 | 968 | ATACCCTCAGCCAGACAGAAGTCAT | Antisense | 1413 |
| 207651_at | 997 | 563 | 985 | GAAGTCATAACTGATTGCTCAACCA | Antisense | 1414 |
| 207651_at | 1084 | 961 | 1000 | TGCTCAACCAGGATTTCACTCTTCA | Antisense | 1415 |
| 207651_at | 572 | 245 | 1025 | AAGCCAAAGAGGCTACACTGCTCCT | Antisense | 1416 |
| 207651_at | 1026 | 961 | 1066 | TGCTTTGATCCTATCCTGTACTATC | Antisense | 1417 |
| 207651_at | 257 | 211 | 1099 | AAAGCATTCCGCTCAAAGGTCACTG | Antisense | 1418 |
| 207651_at | 1005 | 1027 | 1118 | TCACTGAGACTTTTGCCTCACCTAA | Antisense | 1419 |
| 207651_at | 800 | 959 | 1208 | TGCTACCAATTCTGGCCTTACTGGA | Antisense | 1420 |
| 207714_s_at | 400 | 601 | 1348 | GACACATGGGTGCTATTGGGGTTGG | Antisense | 1421 |
| 207714_s_at | 450 | 909 | 1370 | TGGGGGGGAGGTGAGGTACCAGCCT | Antisense | 1422 |
| 207714_s_at | 1020 | 83 | 1383 | AGGTACCAGCCTTGGATACTCCATG | Antisense | 1423 |
| 207714_s_at | 620 | 899 | 1424 | TGGACATGGGCCCCAGATACCATGA | Antisense | 1424 |
| 207714_s_at | 520 | 683 | 1439 | GATACCATGATGCTGAGCCCGGAAA | Antisense | 1425 |
| 207714_s_at | 152 | 77 | 1458 | CGGAAACTCCACATCCTGTGGGACC | Antisense | 1426 |
| 207714_s_at | 464 | 917 | 1474 | TGTGGGACCTGGGCCATAGTCATTC | Antisense | 1427 |
| 207714_s_at | 99 | 397 | 1507 | CTGAAAGTCCCAGATCAAGCCTGCC | Antisense | 1428 |
| 207714_s_at | 957 | 299 | 1522 | CAAGCCTGCCTCAATCAGTATTCAT | Antisense | 1429 |
| 207714_s_at | 682 | 17 | 1547 | ATTTATAGCCAGGTACCTTCTCACC | Antisense | 1430 |
| 207714_s_at | 528 | 153 | 1561 | ACCTTCTCACCTGTGAGACCAAATT | Antisense | 1431 |
| 208296_x_at | 1080 | 1151 | 1417 | TTGAGTTCTCCTTTTAAGTACCAAT | Antisense | 1432 |
| 208296_x_at | 428 | 811 | 1469 | GGTGTGTCATTGCCTTGAAATGCTT | Antisense | 1433 |
| 208296_x_at | 537 | 595 | 1485 | GAAATGCTTGCTTAGGGCTTCTTTT | Antisense | 1434 |
| 208296_x_at | 564 | 1073 | 1497 | TAGGGCTTCTTTTATGTTATCTTAA | Antisense | 1435 |
| 208296_x_at | 1109 | 261 | 1523 | AAGTGCTGGTGAATTTTCCATTTTT | Antisense | 1436 |
| 208296_x_at | 683 | 1145 | 1538 | TTCCATTTTTTACATCCATTTCACA | Antisense | 1437 |
| 208296_x_at | 857 | 593 | 1627 | GAAAGGTAACAATCTTCATTCTACA | Antisense | 1438 |
| 208296_x_at | 713 | 275 | 1727 | AATGCGTGCGTTTCAGTGTTTAAGA | Antisense | 1439 |
| 208296_x_at | 1046 | 297 | 1843 | CAAGCAGTTTGTGTGGTGTTTCTAT | Antisense | 1440 |
| 208296_x_at | 1051 | 201 | 1928 | AAATCTGCTGGCCAGCTATGTCCTC | Antisense | 1441 |
| 208296_x_at | 1016 | 1071 | 1953 | TAGGAAATGACAGACCCAACCACCA | Antisense | 1442 |
| 208498_s_at | 84 | 1041 | 948 | TAACCATGACAATCAACGAGGACAT | Antisense | 1443 |
| 208498_s_at | 882 | 707 | 1165 | GTTACTATTAATCCAGACACTACTT | Antisense | 1444 |
| 208498_s_at | 658 | 911 | 1201 | TGGGTCTGTGAACATCGATGGCGCC | Antisense | 1445 |
| 208498_s_at | 930 | 993 | 1215 | TCGATGGCGCCAAATAAGGAACATG | Antisense | 1446 |
| 208498_s_at | 1058 | 977 | 1247 | TCCGCAATGTAGTGGATGGCCAGCC | Antisense | 1447 |
| 208498_s_at | 497 | 727 | 1255 | GTAGTGGATGGCCAGCCTTTTACAA | Antisense | 1448 |
| 208498_s_at | 520 | 933 | 1287 | TGATAATGGGAGCAACCAAGTGGCT | Antisense | 1449 |
| 208498_s_at | 922 | 773 | 1406 | GTGATGTCATTTCTGGAGATAAAAT | Antisense | 1450 |
| 208498_s_at | 802 | 1059 | 1459 | TACGTTTCTGATGATGGCAAAGCTC | Antisense | 1451 |
| 208498_s_at | 761 | 99 | 1495 | AGTAACTCTGCTGAAGATCCATTTA | Antisense | 1452 |
| 208498_s_at | 708 | 1113 | 1517 | TTATTGCAATTCATGCTGAATCTAA | Antisense | 1453 |
| 208688_x_at | 822 | 943 | 2576 | TGAGCTACAGGACTCCCGAGTGTGA | Antisense | 1454 |
| 208688_x_at | 703 | 905 | 2720 | TGGATTCTGCCATTGCGACACATTT | Antisense | 1455 |
| 208688_x_at | 754 | 491 | 2734 | GCGACACATTTTTGTGCCTTTCAGC | Antisense | 1456 |
| 208688_x_at | 392 | 145 | 2756 | AGCCCCTGGTGTCTGCAGTGGGGGA | Antisense | 1457 |
| 208688_x_at | 613 | 335 | 2771 | CAGTGGGGGATTTAAGGCACCCGCT | Antisense | 1458 |
| 208688_x_at | 866 | 517 | 2793 | GCTTCCACTTCTTTCTTGTTTGGAG | Antisense | 1459 |
| 208688_x_at | 1145 | 1115 | 2812 | TTGGAGTTTTCTGTTGGAACCGCCG | Antisense | 1460 |
| 208688_x_at | 173 | 883 | 2842 | GGCTCCGAAGACTTAGCGACGCCAC | Antisense | 1461 |
| 208688_x_at | 341 | 401 | 2909 | CTGTACACAGCCGAGCAGCATTTCC | Antisense | 1462 |
| 208688_x_at | 932 | 985 | 2931 | TCCGTTGAAGGACTTGCATCCCCAT | Antisense | 1463 |
| 208688_x_at | 391 | 311 | 3017 | CACCGTGCAGGTTGTGGCCGGTTTT | Antisense | 1464 |
| 208799_at | 1121 | 407 | 511 | CTGGCCTCTACTACGTGGACAGTGA | Antisense | 1465 |
| 208799_at | 55 | 1075 | 568 | TAGGTTCTGGCTCTGTGTATGCATA | Antisense | 1466 |
| 208799_at | 509 | 903 | 601 | TGGATCGGGGCTATTCCTATGACCT | Antisense | 1467 |
| 208799_at | 757 | 849 | 632 | GGAGCAGGCCTATGATCTGGCCCGT | Antisense | 1468 |
| 208799_at | 857 | 81 | 695 | AGGAGGTGCAGTCAACCTCTACCAC | Antisense | 1469 |
| 208799_at | 941 | 843 | 725 | GGAGGATGGCTGGATCCGAGTCTCC | Antisense | 1470 |
| 208799_at | 569 | 941 | 773 | TGAGAAGTATAGTGGCTCTACCCCC | Antisense | 1471 |
| 208799_at | 649 | 777 | 823 | GTGTTTCTTGGGGTGACTGTCATTG | Antisense | 1472 |
| 208799_at | 694 | 1033 | 849 | TAATACGGACACAGTGACCCATCCT | Antisense | 1473 |
| 208799_at | 69 | 563 | 891 | GAAGGGCCTTCAATTGTATCAGTAC | Antisense | 1474 |
| 208799_at | 511 | 1041 | 923 | TAAGCTCTGGCACATTGACCTCTAT | Antisense | 1475 |
| 208894_at | 950 | 413 | 356 | CGATCACCAATGTACCTCCAGAGGT | Antisense | 1476 |
| 208894_at | 87 | 681 | 357 | GATCACCAATGTACCTCCAGAGGTA | Antisense | 1477 |
| 208894_at | 907 | 443 | 370 | CCTCCAGAGGTAACTGTGCTCACGA | Antisense | 1478 |
| 208894_at | 549 | 975 | 372 | TCCAGAGGTAACTGTGCTCACGAAC | Antisense | 1479 |
| 208894_at | 674 | 83 | 377 | AGGTAACTGTGCTCACGAACAGCCC | Antisense | 1480 |
| 208894_at | 316 | 963 | 386 | TGCTCACGAACAGCCCTGTGGAACT | Antisense | 1481 |
| 208894_at | 98 | 899 | 404 | TGGAACTGAGAGAGCCCAACGTCCT | Antisense | 1482 |
| 208894_at | 283 | 301 | 420 | CAACGTCCTCATCTGTTTCATAGAC | Antisense | 1483 |
| 208894_at | 812 | 163 | 422 | ACGTCCTCATCTGTTTCATAGACAA | Antisense | 1484 |
| 208894_at | 687 | 759 | 424 | GTCCTCATCTGTTTCATAGACAAGT | Antisense | 1485 |
| 208894_at | 1109 | 399 | 432 | CTGTTTCATAGACAAGTTCACCCCA | Antisense | 1486 |
| 209078_s_at | 545 | 141 | 20 | AGCGACTTCTTCTGAGGAGGTTCCT | Antisense | 1487 |
| 209078_s_at | 383 | 421 | 114 | CCCACAATGCAGTCCTGGTGGCCTG | Antisense | 1488 |
| 209078_s_at | 31 | 909 | 129 | TGGTGGCCTGACTGTAACACCCAAC | Antisense | 1489 |
| 209078_s_at | 821 | 461 | 154 | CCAGCCCGGACAATATACACCACGA | Antisense | 1490 |
| 209078_s_at | 207 | 659 | 177 | GAGGATCTCCTTGACAACCTTTAAT | Antisense | 1491 |
| 209078_s_at | 1110 | 663 | 208 | GATGGACCTGACTTTCAAGACCGAG | Antisense | 1492 |
| 209078_s_at | 15 | 787 | 253 | GTGGTTGTGGATTTCCACGCACAGT | Antisense | 1493 |
| 209078_s_at | 893 | 185 | 273 | ACAGTGGTGTGGACCCTGCAAGATC | Antisense | 1494 |
| 209078_s_at | 30 | 309 | 373 | CACACAGACCTCGCCATTGAGTATG | Antisense | 1495 |
| 209078_s_at | 505 | 941 | 390 | TGAGTATGAGGTGTCAGCGGTGCCC | Antisense | 1496 |
| 209078_s_at | 62 | 969 | 410 | TGCCCACTGTGCTGGCCATGAAGAA | Antisense | 1497 |
| 209129_at | 406 | 893 | 1170 | GGCCACCCTGGAGAAATGTGCCACG | Antisense | 1498 |
| 209129_at | 200 | 903 | 1178 | TGGAGAAATGTGCCACGTGCTCCCA | Antisense | 1499 |
| 209129_at | 766 | 493 | 1224 | GCGGGCTATGGGGAAGGCCTACCAC | Antisense | 1500 |
| 209129_at | 805 | 1127 | 1300 | TTCACAGTGGATGCTACGAGCCAGA | Antisense | 1501 |
| 209129_at | 643 | 511 | 1312 | GCTACGAGCCAGATCCACTGTATTG | Antisense | 1502 |
| 209129_at | 921 | 675 | 1323 | GATCCACTGTATTGAGGACTTTCAC | Antisense | 1503 |
| 209129_at | 65 | 363 | 1341 | CTTTCACAGGAAGTTTGCCCCAAGA | Antisense | 1504 |
| 209129_at | 194 | 435 | 1358 | CCCCAAGATGCTCAGTGTGCGGTGG | Antisense | 1505 |
| 209129_at | 786 | 625 | 1396 | GAGCCAGGTCAGGAGGAGACTGTGA | Antisense | 1506 |
| 209129_at | 16 | 773 | 1417 | GTGAGAATTGTTGCTCTGGATCGAA | Antisense | 1507 |
| 209129_at | 313 | 903 | 1433 | TGGATCGAAGTTTTCACATTGGCTG | Antisense | 1508 |
| 209150_s_at | 288 | 331 | 1594 | CAGTTGTCTGGGGAGGATTACCGCT | Antisense | 1509 |
| 209150_s_at | 246 | 885 | 1625 | GGCGATCTGTGCTGAGTGTTGGCTC | Antisense | 1510 |
| 209150_s_at | 816 | 1013 | 1664 | TCTTCCTCTACTCAGTTTTCTATTA | Antisense | 1511 |
| 209150_s_at | 450 | 1055 | 1672 | TACTCAGTTTTCTATTATGCCCGGC | Antisense | 1512 |
| 209150_s_at | 802 | 417 | 1696 | CGCTCCAACATGTCTGGGGCAGTAC | Antisense | 1513 |
| 209150_s_at | 1025 | 333 | 1724 | CAGTAGAGTTCTTCGGCTACTCCTT | Antisense | 1514 |
| 209150_s_at | 570 | 1057 | 1741 | TACTCCTTACTCACTGGTTATGTCT | Antisense | 1515 |
| 209150_s_at | 439 | 1009 | 1798 | TCTTCCCTAAAGTTCATCCGGTATA | Antisense | 1516 |
| 209150_s_at | 1134 | 665 | 1839 | GATGGACTGAGTTCTGTATGGCAGA | Antisense | 1517 |
| 209150_s_at | 357 | 873 | 1858 | GGCAGAACTATTGCTGTTCTCTCCC | Antisense | 1518 |
| 209150_s_at | 1097 | 103 | 2047 | AGTTGCCTTTAGTTTTGGTCCTGAT | Antisense | 1519 |
| 209254_at | 70 | 809 | 1066 | GGGTCATTGTTTAAGATCTGGCTGG | Antisense | 1520 |
| 209254_at | 82 | 47 | 1081 | ATCTGGCTGGTGGTACCTAGCCTGC | Antisense | 1521 |
| 209254_at | 999 | 731 | 1093 | GTACCTAGCCTGCTGGAACTGGCAT | Antisense | 1522 |
| 209254_at | 702 | 955 | 1175 | TGCACCTTGGACTCACACAGGGACT | Antisense | 1523 |
| 209254_at | 360 | 307 | 1190 | CACAGGGACTCATCGAACGCTTGAA | Antisense | 1524 |
| 209254_at | 1148 | 637 | 1262 | GAGACTCCTTTATTTATGGGCAGTG | Antisense | 1525 |
| 209254_at | 1085 | 651 | 1306 | GATTGGTTACCCTGATCAAGGCCTT | Antisense | 1526 |
| 209254_at | 295 | 715 | 1375 | GTTTATGGACATCTCACTTTCCCAC | Antisense | 1527 |
| 209254_at | 913 | 983 | 1425 | TCCTGACCCATTACATGCACATGTA | Antisense | 1528 |
| 209254_at | 736 | 345 | 1438 | CATGCACATGTACTCACATACTCCC | Antisense | 1529 |
| 209254_at | 236 | 427 | 1460 | CCCTCTTCCTTCTCGATGGAGTTAA | Antisense | 1530 |
| 209262_s_at | 698 | 995 | 1347 | TCGGGCCAGTGACCATGACGGGGCC | Antisense | 1531 |
| 209262_s_at | 596 | 799 | 1408 | GGGACAGGGAATGCTGAGGCCTCGA | Antisense | 1532 |
| 209262_s_at | 248 | 255 | 1539 | AAGAGACTGATCATCCAGGCCTCAG | Antisense | 1533 |
| 209262_s_at | 1018 | 401 | 1584 | CTGTCCAGGATGGAGGGTCCAATCC | Antisense | 1534 |
| 209262_s_at | 647 | 809 | 1598 | GGGTCCAATCCTAGGACAGCCTTGT | Antisense | 1535 |
| 209262_s_at | 806 | 1023 | 1626 | TCAGCACCCCTAGCATGAACTTGTG | Antisense | 1536 |
| 209262_s_at | 61 | 665 | 1678 | GATGGACAAAGGCCTGGCGTCGGCC | Antisense | 1537 |
| 209262_s_at | 884 | 335 | 1716 | CAGTGGGCAGGGGTAGCTAGCGTGT | Antisense | 1538 |
| 209262_s_at | 51 | 511 | 1731 | GCTAGCGTGTGCCAGGCAGATCCTC | Antisense | 1539 |
| 209262_s_at | 658 | 331 | 1747 | CAGATCCTCTGGACACGTAACCTAT | Antisense | 1540 |
| 209262_s_at | 472 | 189 | 1759 | ACACGTAACCTATGTCAGACACTAC | Antisense | 1541 |
| 209277_at | 168 | 773 | 1154 | GTGAGACTGAATTCTTGCAATGCAT | Antisense | 1542 |
| 209277_at | 693 | 57 | 1196 | ATGACTCACTCATTTCTTGGGGTCG | Antisense | 1543 |
| 209277_at | 40 | 1029 | 1201 | TCACTCATTTCTTGGGGTCGTATTC | Antisense | 1544 |
| 209277_at | 826 | 1159 | 1212 | TTGGGGTCGTATTCCTGATTTCAGA | Antisense | 1545 |
| 209277_at | 199 | 253 | 1261 | AAGACAATATAATCATGTGCTTTTA | Antisense | 1546 |
| 209277_at | 246 | 15 | 1345 | ATTATATTTTAGTCCCAAGAAGACA | Antisense | 1547 |
| 209277_at | 635 | 565 | 1363 | GAAGACAAAGTCGCAGATTAACAAC | Antisense | 1548 |
| 209277_at | 631 | 97 | 1371 | AGTCGCAGATTAACAACACTTTAAA | Antisense | 1549 |
| 209277_at | 50 | 171 | 1402 | ACTCCCATTTTATTGTGTTAGATTG | Antisense | 1550 |
| 209277_at | 4 | 679 | 1462 | GATCTTAACTTTCTTGACTGATTTA | Antisense | 1551 |
| 209277_at | 309 | 981 | 1522 | TCCTCTGGGAAAGCAATTTCTATCT | Antisense | 1552 |
| 209606_at | 595 | 493 | 1164 | GAATTGCAAAACTGACATCCCATTT | Antisense | 1553 |
| 209606_at | 140 | 169 | 1174 | ACTGACATCCCATTTCACAGCAATA | Antisense | 1554 |
| 209606_at | 1008 | 309 | 1189 | CACAGCAATAGTGACCTTTATTTAA | Antisense | 1555 |
| 209606_at | 778 | 697 | 1217 | GTTGTGTTATAGTTTATGCTTCTTA | Antisense | 1556 |
| 209606_at | 422 | 1099 | 1249 | TTTCAACCTAAACAGCCAATTTCTA | Antisense | 1557 |
| 209606_at | 735 | 189 | 1260 | ACAGCCAATTTCTAAGCAGACAGGA | Antisense | 1558 |
| 209606_at | 240 | 1087 | 1369 | TATTTTCTAGATTATCCCTGTGAAT | Antisense | 1559 |
| 209606_at | 292 | 201 | 1485 | AAATCTTAGGTTTGCTTATGCCCAG | Antisense | 1560 |
| 209606_at | 775 | 499 | 1590 | GCTGTTTCTCACATCTATAGTGACA | Antisense | 1561 |
| 209606_at | 195 | 25 | 1639 | ATAGGAGGGGTTAAGGTTCATGAGA | Antisense | 1562 |
| 209606_at | 790 | 823 | 1679 | GGTCTGAGATGGGTGCTGCAAAGAT | Antisense | 1563 |
| 209728_at | 847 | 523 | 690 | GCATCCAAGCATGATGAGCCCTCTC | Antisense | 1564 |
| 209728_at | 29 | 347 | 691 | CATCCAAGCATGATGAGCCCTCTCA | Antisense | 1565 |
| 209728_at | 319 | 145 | 706 | AGCCCTCTCACGGTGCAATGGAGTG | Antisense | 1566 |
| 209728_at | 77 | 487 | 707 | GCCCTCTCACGGTGCAATGGAGTGC | Antisense | 1567 |
| 209728_at | 329 | 427 | 708 | CCCTCTCACGGTGCAATGGAGTGCA | Antisense | 1568 |
| 209728_at | 189 | 547 | 720 | GCAATGGAGTGCACGGTCTGAATCT | Antisense | 1569 |
| 209728_at | 343 | 149 | 854 | AGCCAACAGGACTCTTGAGCTGAAG | Antisense | 1570 |
| 209728_at | 233 | 433 | 1143 | CCCCTTGTGCCACACATTGCATTAT | Antisense | 1571 |
| 209728_at | 341 | 425 | 1144 | CCCTTGTGCCACACATTGCATTATT | Antisense | 1572 |
| 209728_at | 512 | 357 | 1146 | CTTGTGCCACACATTGCATTATTAA | Antisense | 1573 |
| 209728_at | 600 | 761 | 1149 | GTGCCACACATTGCATTATTAAATG | Antisense | 1574 |
| 209795_at | 451 | 1071 | 1143 | TAGTCTAATTGAATCCCTTAAACTC | Antisense | 1575 |
| 209795_at | 691 | 67 | 1273 | ATGGGATGATCGTGTATTTATTTTT | Antisense | 1576 |
| 209795_at | 665 | 1107 | 1294 | TTTTTTACTTCCTCAGCTGTAGACA | Antisense | 1577 |
| 209795_at | 1000 | 177 | 1300 | ACTTCCTCAGCTGTAGACAGGTCCT | Antisense | 1578 |
| 209795_at | 563 | 603 | 1315 | GACAGGTCCTTTTCGATGGTACATA | Antisense | 1579 |
| 209795_at | 188 | 907 | 1331 | TGGTACATATTTCTTTGCCTTTATA | Antisense | 1580 |
| 209795_at | 302 | 1083 | 1352 | TATAATCTTTTATACAGTGTCTTAC | Antisense | 1581 |
| 209795_at | 1015 | 773 | 1450 | GTGATGTGGCAAATCTCTATTAGGA | Antisense | 1582 |
| 209795_at | 970 | 21 | 1476 | ATATTCTGTAATCTTCAGACCTAGA | Antisense | 1583 |
| 209795_at | 859 | 83 | 1520 | AGGTTTGTGACTTTCCTAAATCAAT | Antisense | 1584 |
| 209795_at | 232 | 1059 | 1550 | TACGTGCAATACTTCAATACTTCAT | Antisense | 1585 |
| 210017_at | 352 | 275 | 4267 | AATGACTGCAAAAGTGCCACGGATA | Antisense | 1586 |
| 210017_at | 721 | 95 | 4279 | AGTGCCACGGATATCAATTTGAGGG | Antisense | 1587 |
| 210017_at | 1160 | 657 | 4355 | GAGGATCAACTGTACCATATTTAAT | Antisense | 1588 |
| 210017_at | 1097 | 267 | 4470 | AAGGAATCTTCCTAGATATGATAAA | Antisense | 1589 |
| 210017_at | 869 | 487 | 4512 | GCCCACACCTAACATTATACTTCAT | Antisense | 1590 |
| 210017_at | 914 | 613 | 4544 | GACTGAAGGCTGAATGTTTTCCCCT | Antisense | 1591 |
| 210017_at | 748 | 77 | 4583 | AGGACAAGGATGTTCACTCGGCACT | Antisense | 1592 |
| 210017_at | 249 | 995 | 4600 | TCGGCACTACTTCTATTCAGCATTG | Antisense | 1593 |
| 210017_at | 447 | 1055 | 4607 | TACTTCTATTCAGCATTGTACTTGA | Antisense | 1594 |
| 210017_at | 349 | 1007 | 4635 | TCTAGCCACAGCAGTTAGGTTAGGA | Antisense | 1595 |
| 210017_at | 1095 | 1073 | 4655 | TAGGAATTCAAGGTTTGTTCAACAT | Antisense | 1596 |
| 210052_s_at | 383 | 99 | 2683 | AGTCAAGTGACCAGCCTCTGACTGT | Antisense | 1597 |
| 210052_s_at | 605 | 171 | 2730 | ACTCGATTCCACTGCTAAACTCAGC | Antisense | 1598 |
| 210052_s_at | 375 | 1025 | 2750 | TCAGCTGTGAGCTGCGGATACCGCC | Antisense | 1599 |
| 210052_s_at | 916 | 155 | 2785 | ACCTGCTCTTAACCTCAAACCTAGG | Antisense | 1600 |
| 210052_s_at | 1037 | 369 | 2805 | CTAGGACCGTCTTGCTTTGTCATTG | Antisense | 1601 |
| 210052_s_at | 959 | 847 | 2835 | GGAGAGAACCCATTTCTCCAGACTT | Antisense | 1602 |
| 210052_s_at | 882 | 1115 | 2860 | TTACCTACCCGTGCCTGAGAAAGCA | Antisense | 1603 |
| 210052_s_at | 1069 | 521 | 2882 | GCATACTTGACAACTGTGGACTCCA | Antisense | 1604 |
| 210052_s_at | 935 | 1053 | 2991 | TACTTCCTTTAAACCATCAGCCGGC | Antisense | 1605 |
| 210052_s_at | 675 | 477 | 3014 | GCCTTTTATATGGGTCTTCACTCTG | Antisense | 1606 |
| 210052_s_at | 556 | 779 | 3067 | GTGTAATCTCTATTGCTATTGCCCC | Antisense | 1607 |
| 210258_at | 201 | 189 | 994 | ACAGCAAGCCTATGTAGTTCAATTA | Antisense | 1608 |
| 210258_at | 789 | 777 | 1167 | GTGTTTCTAGCATGAATGTTCTATA | Antisense | 1609 |
| 210258_at | 785 | 599 | 1219 | GACAAATGCTACTCACAGTACAATC | Antisense | 1610 |
| 210258_at | 84 | 819 | 1274 | GGTGTTCTTCAGAGACATTTTATCT | Antisense | 1611 |
| 210258_at | 538 | 199 | 1302 | AAATTTTCCTACTATTATGTTCATT | Antisense | 1612 |
| 210258_at | 638 | 227 | 1327 | AACAAACTTCTTTATCACATGTATC | Antisense | 1613 |
| 210258_at | 1135 | 719 | 1347 | GTATCTTCTACGTGTAAAACATTTC | Antisense | 1614 |
| 210258_at | 20 | 57 | 1396 | ATGAATTTCTTCATTTGCTCTTGCA | Antisense | 1615 |
| 210258_at | 407 | 1149 | 1410 | TTGCTCTTGCATCTACATTGCTATA | Antisense | 1616 |
| 210258_at | 239 | 61 | 1467 | ATGTTTTTTCCTTACAATGTGAACT | Antisense | 1617 |
| 210258_at | 142 | 295 | 1481 | CAATGTGAACTCATCGTGATCTTGG | Antisense | 1618 |
| 210260_s_at | 1031 | 693 | 1244 | GATTGAGTCATCGACATTCAGGATT | Antisense | 1619 |
| 210260_s_at | 234 | 1 | 1263 | AGGATTTAAGTCTGAGGTAGTCAAC | Antisense | 1620 |
| 210260_s_at | 946 | 219 | 1300 | AAAAATGGCTTATCTGAAATCAGTA | Antisense | 1621 |
| 210260_s_at | 544 | 55 | 1376 | ATGCTTCTGGAATTGAGTTCTCCTT | Antisense | 1622 |
| 210260_s_at | 142 | 647 | 1390 | GAGTTCTCCTTTTAAGTACCAATGA | Antisense | 1623 |
| 210260_s_at | 855 | 923 | 1434 | TGTAATGGTGTGTCATTGCCTTGAA | Antisense | 1624 |
| 210260_s_at | 897 | 779 | 1443 | GTGTCATTGCCTTGAAATGCTTGCT | Antisense | 1625 |
| 210260_s_at | 276 | 949 | 1455 | TGAAATGCTTGCTTAGGGCTTCTTT | Antisense | 1626 |
| 210260_s_at | 86 | 223 | 1546 | AAAAGTCTAGATTGGTCTTGATATT | Antisense | 1627 |
| 210260_s_at | 748 | 293 | 1607 | CAATCTTCATTCTACAGATGAACTC | Antisense | 1628 |
| 210260_s_at | 833 | 493 | 1701 | GCGTGCGTTTCAGTGTTTAAGAAGG | Antisense | 1629 |
| 210306_at | 923 | 269 | 2827 | AATGGGTTTAATGAGGTCTACCTTG | Antisense | 1630 |
| 210306_at | 1120 | 357 | 2848 | CTTGCAGAGCCATTGTGAGCATTGG | Antisense | 1631 |
| 210306_at | 273 | 553 | 2884 | GAATCATACCAGAACGTCTAGTATA | Antisense | 1632 |
| 210306_at | 319 | 313 | 2959 | CACTAGGCAATTCTGTCATTGTGTA | Antisense | 1633 |
| 210306_at | 951 | 1057 | 3079 | TACTGAATGTCAGTCATTTCCCCTA | Antisense | 1634 |
| 210306_at | 198 | 547 | 3112 | GCAATGCCAATATCAAGGGCCATGT | Antisense | 1635 |
| 210306_at | 366 | 263 | 3126 | AAGGGCCATGTATCAGGTTTCTGTA | Antisense | 1636 |
| 210306_at | 440 | 339 | 3139 | CAGGTTTCTGTATATGTTCCACTAT | Antisense | 1637 |
| 210306_at | 626 | 729 | 3218 | GTAGCATATGGCTGTGTATCACTAG | Antisense | 1638 |
| 210306_at | 586 | 1077 | 3271 | TATGTAGATCCAATCACTTTACCTA | Antisense | 1639 |
| 210306_at | 13 | 205 | 3300 | AAATGACTGCTATGGTGGGAACACA | Antisense | 1640 |
| 210976_s_at | 218 | 491 | 2479 | GCGTAAGAGGGCTCTGGTCTTCCAA | Antisense | 1641 |
| 210976_s_at | 106 | 1089 | 2534 | TTTGAGCATCGAATCCCCAAGGAAC | Antisense | 1642 |
| 210976_s_at | 359 | 237 | 2571 | AACTGAGGCCCATCCTCAAAATCCT | Antisense | 1643 |
| 210976_s_at | 614 | 947 | 2611 | TGACTTGGACACTTCAGACCATGCC | Antisense | 1644 |
| 210976_s_at | 667 | 969 | 2674 | TGCCGTCTAAACCTCTCTGGAGTGA | Antisense | 1645 |
| 210976_s_at | 1127 | 137 | 2725 | AGCTCACACCCTAATAAGTCCACAT | Antisense | 1646 |
| 210976_s_at | 972 | 261 | 2740 | AAGTCCACATCTTCTCAGTGTTTTA | Antisense | 1647 |
| 210976_s_at | 67 | 1089 | 2791 | TATTCTGTACCTTGCAGCCATGACC | Antisense | 1648 |
| 210976_s_at | 334 | 423 | 2890 | CCCAGCTTTATCTGTCACACAAGGC | Antisense | 1649 |
| 210976_s_at | 442 | 511 | 2929 | GCTACTGCTAGATATCACTTACTCA | Antisense | 1650 |
| 210976_s_at | 938 | 253 | 3002 | AAGAGTCTTGGTTCCTCTACTACTT | Antisense | 1651 |
| 211149_at | 115 | 327 | 6000 | CAGAAACCTCGATATATAATTGTAT | Antisense | 1652 |
| 211149_at | 70 | 1113 | 6039 | TTATTTTTTACATCTATGGTAGTTT | Antisense | 1653 |
| 211149_at | 365 | 1 | 6054 | ATGGTAGTTTTTGAGGTGCCTATTA | Antisense | 1654 |
| 211149_at | 515 | 1047 | 6079 | TAAAGTATTACGGAAGTTTGCTGTT | Antisense | 1655 |
| 211149_at | 157 | 689 | 6128 | GATTTATTAAGTTGTAGTCACCATA | Antisense | 1656 |
| 211149_at | 1129 | 727 | 6141 | GTAGTCACCATAGTGATAGCCCATA | Antisense | 1657 |
| 211149_at | 1159 | 683 | 6155 | GATAGCCCATAAATAATTGCTGGAA | Antisense | 1658 |
| 211149_at | 290 | 691 | 6294 | GATTCAGAATGATAACCTCTTTTAG | Antisense | 1659 |
| 211149_at | 517 | 595 | 6361 | GAAATGCTATACTGTCCTGCTTGTA | Antisense | 1660 |
| 211149_at | 993 | 165 | 6371 | ACTGTCCTGCTTGTACAACATGGTT | Antisense | 1661 |
| 211149_at | 1021 | 725 | 6383 | GTACAACATGGTTTGGGGTGAAGGG | Antisense | 1662 |
| 211421_s_at | 174 | 269 | 3054 | AAGGCTTGGATGCGTGTGTAATAGA | Antisense | 1663 |
| 211421_s_at | 162 | 29 | 3074 | ATAGAGCCTTATGGTGTGTGCGCAC | Antisense | 1664 |
| 211421_s_at | 1105 | 1089 | 3128 | TATTGGACACGTAACCTGGCTCTAA | Antisense | 1665 |
| 211421_s_at | 646 | 157 | 3141 | ACCTGGCTCTAATTTGGGCTGTTTT | Antisense | 1666 |
| 211421_s_at | 1160 | 681 | 3169 | GATACACTGTGATAAGTTCTTTTAC | Antisense | 1667 |
| 211421_s_at | 166 | 217 | 3213 | AAACTTTTGGTTTTCAGATATGCTT | Antisense | 1668 |
| 211421_s_at | 386 | 685 | 3229 | GATATGCTTAATGATAGTCTTACTA | Antisense | 1669 |
| 211421_s_at | 833 | 501 | 3317 | GCTGCAACAGGTTTGTTCTCAGGAG | Antisense | 1670 |
| 211421_s_at | 1144 | 623 | 3409 | GACCAATAACCTAATTGTCTATTCC | Antisense | 1671 |
| 211421_s_at | 724 | 987 | 3447 | TCCCCATCCTTATTAGCTCTACTGG | Antisense | 1672 |
| 211421_s_at | 797 | 243 | 3584 | AACCAGATCATGTTCCTTTTTTTGT | Antisense | 1673 |
| 211603_s_at | 522 | 821 | 1524 | GGTGCTGCCCTGTGTACATATAAAT | Antisense | 1674 |
| 211603_s_at | 740 | 817 | 1555 | GGTGTTGGGGAAACCTTCATCTGAA | Antisense | 1675 |
| 211603_s_at | 193 | 121 | 1634 | AGACTCTGAGCTGCTCACCGGAGTC | Antisense | 1676 |
| 211603_s_at | 960 | 501 | 1643 | GCTGCTCACCGGAGTCATTGGGAAG | Antisense | 1677 |
| 211603_s_at | 23 | 371 | 1690 | CTAGAGTCTCAGAAACTCCCCTGGG | Antisense | 1678 |
| 211603_s_at | 491 | 843 | 1732 | GGAGGAATTCAGCTCAGCTTCTTCC | Antisense | 1679 |
| 211603_s_at | 664 | 195 | 1797 | ACAAGAGTTTGTTCTGTTCTGGGGG | Antisense | 1680 |
| 211603_s_at | 444 | 995 | 1814 | TCTGGGGGACAGAGAAGGCGCTTCC | Antisense | 1681 |
| 211603_s_at | 991 | 515 | 1833 | GCTTCCCAACTTCATACTGGCAGGA | Antisense | 1682 |
| 211603_s_at | 540 | 819 | 1859 | GGTGAGGAGGTTCACTGAGCTCCCC | Antisense | 1683 |
| 211603_s_at | 718 | 421 | 1890 | CCCACTGCGGGGAGACAGAAGCCTG | Antisense | 1684 |
| 211676_s_at | 750 | 583 | 1111 | GAAAATATTCCTGACGTGGTCCCGG | Antisense | 1685 |
| 211676_s_at | 850 | 535 | 1136 | GCAGCCATCTGACTCCAATAGAGAG | Antisense | 1686 |
| 211676_s_at | 505 | 641 | 1158 | GAGAGAGAGTTCTTCACCTTTAAGT | Antisense | 1687 |
| 211676_s_at | 100 | 739 | 1184 | GTAACCAGTCTGAACCTGGCAGCAT | Antisense | 1688 |
| 211676_s_at | 510 | 873 | 1201 | GGCAGCATCGCTTTAAACTCGTATC | Antisense | 1689 |
| 211676_s_at | 697 | 215 | 1215 | AAACTCGTATCACTCCAGAAATTGT | Antisense | 1690 |
| 211676_s_at | 1114 | 1091 | 1267 | TTTGATACTGATTCCAGCTGTCTGG | Antisense | 1691 |
| 211676_s_at | 594 | 553 | 1291 | GAATCACATAGCTCCTTATCTGACT | Antisense | 1692 |
| 211676_s_at | 936 | 1115 | 1306 | TTATCTGACTCAGAATTTCCCCCAA | Antisense | 1693 |
| 211676_s_at | 995 | 559 | 1354 | GAAGGACAAGAGCTCATAACCGTAA | Antisense | 1694 |
| 211676_s_at | 855 | 183 | 1413 | ACATGTGCTAGTGGATCTACTTGTG | Antisense | 1695 |
| 212134_at | 150 | 1025 | 4469 | TCAGCCCTGATGCACAGGCTGCCAG | Antisense | 1696 |
| 212134_at | 502 | 165 | 4520 | ACTGGTGCCTTGCTTAGAGCCAGAA | Antisense | 1697 |
| 212134_at | 749 | 469 | 4538 | GCCAGAAGGGATGAAGCCGGGGGAT | Antisense | 1698 |
| 212134_at | 1101 | 571 | 4550 | GAAGCCGGGGGATCTATGGAACAGA | Antisense | 1699 |
| 212134_at | 726 | 659 | 4573 | GAGGAGGAGCGATGCAGTTGGGAGA | Antisense | 1700 |
| 212134_at | 868 | 861 | 4598 | GGAAGCTAGAAGGGTTATGGTTGGA | Antisense | 1701 |
| 212134_at | 254 | 331 | 4708 | CAGAGGGGAAGGGCCCTGTGGTGCC | Antisense | 1702 |
| 212134_at | 119 | 1145 | 4740 | TTCCTTCAGCCTCCGAAGGGTGATG | Antisense | 1703 |
| 212134_at | 613 | 519 | 4855 | GCATTGAGCCCTTGGTTGCCTGGGC | Antisense | 1704 |
| 212134_at | 383 | 811 | 4887 | GGGGGTTTTCAGTATTTGTAAGCAT | Antisense | 1705 |
| 212134_at | 1015 | 721 | 4898 | GTATTTGTAAGCATTTCAGCAGAAC | Antisense | 1706 |
| 212349_at | 697 | 903 | 4080 | TGGAGTGTGTTCCTGAAGAGCAGCC | Antisense | 1707 |
| 212349_at | 103 | 663 | 4125 | GAGGCAGGCATAGGCAGGGAACCGA | Antisense | 1708 |
| 212349_at | 156 | 799 | 4141 | GGGAACCGAGCAGCAGGTCAGAGCA | Antisense | 1709 |
| 212349_at | 1027 | 73 | 4165 | AGGCGAGCTGACATTCTGCAGCCTG | Antisense | 1710 |
| 212349_at | 733 | 481 | 4185 | GCCTGGACGGCCATGGCAGGAAGCT | Antisense | 1711 |
| 212349_at | 913 | 245 | 4230 | AAGCCTCCTAGGGTTCTGAGCAGAA | Antisense | 1712 |
| 212349_at | 1123 | 813 | 4257 | GGGGCATGAGCTGATTCACATTCTG | Antisense | 1713 |
| 212349_at | 955 | 179 | 4274 | ACATTCTGAAGGACCTCTCTAGCTG | Antisense | 1714 |
| 212349_at | 236 | 211 | 4333 | AAAGCAGAGAGACCAGTGCAGGGCT | Antisense | 1715 |
| 212349_at | 790 | 699 | 4367 | GTTGCAGGCGAGAGACTGGGGTGCT | Antisense | 1716 |
| 212349_at | 173 | 1005 | 4425 | TCTCCCAAGAGACAAAGGCCATTGC | Antisense | 1717 |
| 212379_at | 732 | 201 | 2003 | AAATCGTGGCAAAATCTTCCCTCCA | Antisense | 1718 |
| 212379_at | 36 | 553 | 2064 | GACTTTAGGGGACTTACTTCTCACG | Antisense | 1719 |
| 212379_at | 1023 | 553 | 2096 | GAATCTACAGCCATTCACTGTTACC | Antisense | 1720 |
| 212379_at | 397 | 313 | 2111 | CACTGTTACCTGTCCTACGTTCAGG | Antisense | 1721 |
| 212379_at | 501 | 243 | 2144 | AAGCCTTTGCCCATATTACTGGTGG | Antisense | 1722 |
| 212379_at | 795 | 173 | 2175 | ACTAGAGAACATCCCCAGAGTCCTC | Antisense | 1723 |
| 212379_at | 22 | 621 | 2232 | GACCTGGAGGATCCCCAGGGTCTTC | Antisense | 1724 |
| 212379_at | 1021 | 325 | 2266 | CAGCAGGAAGGACACCTCTCTGAGG | Antisense | 1725 |
| 212379_at | 171 | 787 | 2413 | GTGGTTGCACGAGCTGAAGGTTCCC | Antisense | 1726 |
| 212379_at | 405 | 557 | 2428 | GAAGGTTCCCCACGTGTGAAAGTCA | Antisense | 1727 |
| 212379_at | 1000 | 557 | 2496 | GAATGGCTCCCTGACAAATCATTTC | Antisense | 1728 |
| 212654_at | 304 | 815 | 804 | GGTGGCCGAGAGTAAATGTGGGGAC | Antisense | 1729 |
| 212654_at | 339 | 737 | 815 | GTAAATGTGGGGACCTAGAGGAGGA | Antisense | 1730 |
| 212654_at | 180 | 903 | 872 | TGGAGGCCCAGGCGGACAAGTATTC | Antisense | 1731 |
| 212654_at | 145 | 341 | 880 | CAGGCGGACAAGTATTCCACCAAAG | Antisense | 1732 |
| 212654_at | 339 | 673 | 1024 | GATGAAGTCTATGCCCAGAAGATGA | Antisense | 1733 |
| 212654_at | 447 | 77 | 1067 | AGGAACTGGACAACGCACTCAATGA | Antisense | 1734 |
| 212654_at | 592 | 599 | 1075 | GACAACGCACTCAATGACATCACCT | Antisense | 1735 |
| 212654_at | 541 | 981 | 1149 | TCCTTTCCATTCTCTCTATGGGGAG | Antisense | 1736 |
| 212654_at | 13 | 661 | 1186 | GAGGAGCAGAAATTGCCAACATTGC | Antisense | 1737 |
| 212654_at | 183 | 1147 | 1198 | TTGCCAACATTGCACAGCCAGGCTG | Antisense | 1738 |
| 212654_at | 208 | 405 | 1220 | CTGGGAGCAGCCTAGGGAGAGCCCC | Antisense | 1739 |
| 212671_s_at | 689 | 149 | 439 | ACCAATGAGGTTCCTGAGGTCACAG | Antisense | 1740 |
| 212671_s_at | 593 | 59 | 443 | ATGAGGTTCCTGAGGTCACAGTGTT | Antisense | 1741 |
| 212671_s_at | 710 | 83 | 446 | AGGTTCCTGAGGTCACAGTGTTTTC | Antisense | 1742 |
| 212671_s_at | 604 | 983 | 450 | TCCTGAGGTCACAGTGTTTTCCAAG | Antisense | 1743 |
| 212671_s_at | 458 | 749 | 512 | GTCTTGTGGACAACATCTTTCCTCC | Antisense | 1744 |
| 212671_s_at | 615 | 383 | 604 | CTCTCCAAGAGTGATCATTCCTTCT | Antisense | 1745 |
| 212671_s_at | 807 | 467 | 608 | CCAAGAGTGATCATTCCTTCTTCAA | Antisense | 1746 |
| 212671_s_at | 232 | 113 | 611 | AGAGTGATCATTCCTTCTTCAAGAT | Antisense | 1747 |
| 212671_s_at | 793 | 93 | 613 | AGTGATCATTCCTTCTTCAAGATCA | Antisense | 1748 |
| 212671_s_at | 731 | 671 | 664 | GATGAGATTTATGACTGCAAGGTGG | Antisense | 1749 |
| 212671_s_at | 573 | 443 | 709 | CCTCTTCTGAAACACTGGGAGCCTG | Antisense | 1750 |
| 212684_at | 268 | 611 | 1158 | GACTATTTCAAAGCTACTGTTCCTA | Antisense | 1751 |
| 212684_at | 555 | 699 | 1176 | GTTCCTAGTCCAGCTTTAAGTTTCG | Antisense | 1752 |
| 212684_at | 683 | 499 | 1212 | GCTGTTTTGTTTCATGATTTCGTTA | Antisense | 1753 |
| 212684_at | 414 | 671 | 1305 | GATGATGGTGTCCTTTAGGGCTCTT | Antisense | 1754 |
| 212684_at | 1067 | 89 | 1321 | AGGGCTCTTGGAGCAGCCAGACCAT | Antisense | 1755 |
| 212684_at | 957 | 103 | 1399 | AGTTGTCCTGGGGCTGAATGGGCAA | Antisense | 1756 |
| 212684_at | 1098 | 557 | 1414 | GAATGGGCAAATCTGTCCAAACAGC | Antisense | 1757 |
| 212684_at | 596 | 495 | 1437 | GCTAGTAACCGGCTGTGAGGGAGAG | Antisense | 1758 |
| 212684_at | 844 | 745 | 1463 | GTCAGAAGCACTTAGCGTTGGCCTC | Antisense | 1759 |
| 212684_at | 377 | 61 | 1532 | ATGATTTTCTCTAAATGCCTGGGTA | Antisense | 1760 |
| 212684_at | 148 | 1127 | 1565 | TTCAAGGAGCTCACTTGGCCTGCTT | Antisense | 1761 |
| 212775_at | 944 | 1025 | 2521 | TCACCGTCACAGAGTCTTACCAAAG | Antisense | 1762 |
| 212775_at | 556 | 743 | 2526 | GTCACAGAGTCTTACCAAAGTCAGG | Antisense | 1763 |
| 212775_at | 951 | 305 | 2541 | CAAAGTCAGGACAGTTCAAATAACA | Antisense | 1764 |
| 212775_at | 996 | 225 | 2562 | AACAATCCGGAGTTATGCGTCCTCT | Antisense | 1765 |
| 212775_at | 1056 | 293 | 2564 | CAATCCGGAGTTATGCGTCCTCTTG | Antisense | 1766 |
| 212775_at | 787 | 985 | 2567 | TCCGGAGTTATGCGTCCTCTTGAAA | Antisense | 1767 |
| 212775_at | 846 | 709 | 2573 | GTTATGCGTCCTCTTGAAAAAGCCG | Antisense | 1768 |
| 212775_at | 209 | 493 | 2578 | GCGTCCTCTTGAAAAAGCCGAAGAC | Antisense | 1769 |
| 212775_at | 1078 | 455 | 2628 | CCATGGCGACGAACAGCTGGCACTG | Antisense | 1770 |
| 212775_at | 66 | 417 | 2637 | CGAACAGCTGGCACTGAGTAGCAGC | Antisense | 1771 |
| 212775_at | 720 | 189 | 2640 | ACAGCTGGCACTGAGTAGCAGCTGC | Antisense | 1772 |
| 212776_s_at | 63 | 1003 | 2263 | TCTCCTCGTGGATCGTGTATCCCAG | Antisense | 1773 |
| 212776_s_at | 507 | 983 | 2265 | TCCTCGTGGATCGTGTATCCCAGCG | Antisense | 1774 |
| 212776_s_at | 1108 | 411 | 2276 | CGTGTATCCCAGCGGCAAGGTGTAT | Antisense | 1775 |
| 212776_s_at | 210 | 723 | 2279 | GTATCCCAGCGGCAAGGTGTATGTG | Antisense | 1776 |
| 212776_s_at | 163 | 461 | 2284 | CCAGCGGCAAGGTGTATGTGGCAGC | Antisense | 1777 |
| 212776_s_at | 1127 | 915 | 2324 | TGTGGTGCTGACCTGTGAGCTATGC | Antisense | 1778 |
| 212776_s_at | 404 | 531 | 2358 | GCAGAGGTGCGCTGGACCAAGGATG | Antisense | 1779 |
| 212776_s_at | 4 | 129 | 2461 | AGCTCGAGGACTCCGGCGAGTACTT | Antisense | 1780 |
| 212776_s_at | 921 | 411 | 2465 | CGAGGACTCCGGCGAGTACTTGTGT | Antisense | 1781 |
| 212776_s_at | 512 | 613 | 2469 | GACTCCGGCGAGTACTTGTGTGAAA | Antisense | 1782 |
| 212776_s_at | 362 | 197 | 2491 | AAATTGACGATGAGTCGGCCTCCTT | Antisense | 1783 |
| 212801_at | 618 | 295 | 5406 | CAAGGCATCTGTTGCTTTGGGTCCT | Antisense | 1784 |
| 212801_at | 713 | 945 | 5517 | TGACCGTGTTTTCAACTGTGTCCAC | Antisense | 1785 |
| 212801_at | 281 | 977 | 5556 | TCCAGATTGCAACCTGGCCTGCATC | Antisense | 1786 |
| 212801_at | 281 | 983 | 5590 | TCCTGCTCGTGTCTTAACCTAAGTG | Antisense | 1787 |
| 212801_at | 589 | 389 | 5641 | CTCCATGTGGTAGCTCCTTTGGCAA | Antisense | 1788 |
| 212801_at | 65 | 273 | 5665 | AATGTCCTGCTGTGGCGTTTTATGT | Antisense | 1789 |
| 212801_at | 343 | 65 | 5686 | ATGTGTTGCTTGGAGTCTGTGGGGT | Antisense | 1790 |
| 212801_at | 1031 | 987 | 5725 | TCCCGTCCCCAGGGCAGATTTGATT | Antisense | 1791 |
| 212801_at | 674 | 499 | 5758 | GCTGAAGTTTTGTCTCTTGGTCCAC | Antisense | 1792 |
| 212801_at | 714 | 271 | 5805 | AATGGGTCTTTCAGTCTTGGCATTT | Antisense | 1793 |
| 212801_at | 1139 | 721 | 5875 | GTATATTGTGTGTCTCATCTGTGAA | Antisense | 1794 |
| 212877_at | 1091 | 657 | 411 | GAGGAAAATGAAGCTCGGGCTGGTT | Antisense | 1795 |
| 212877_at | 973 | 571 | 420 | GAAGCTCGGGCTGGTTAACTGACTT | Antisense | 1796 |
| 212877_at | 178 | 505 | 423 | GCTCGGGCTGGTTAACTGACTTGCT | Antisense | 1797 |
| 212877_at | 519 | 407 | 426 | CGGGCTGGTTAACTGACTTGCTCAG | Antisense | 1798 |
| 212877_at | 244 | 497 | 429 | GCTGGTTAACTGACTTGCTCAGCGT | Antisense | 1799 |
| 212877_at | 613 | 417 | 543 | CGCTGTGTCTAGCAGCCTCTAGGAT | Antisense | 1800 |
| 212877_at | 800 | 923 | 548 | TGTCTAGCAGCCTCTAGGATCTTGT | Antisense | 1801 |
| 212877_at | 607 | 441 | 637 | CCTGATTTCTGTATACATGTAGCTT | Antisense | 1802 |
| 212877_at | 713 | 927 | 646 | TGTATACATGTAGCTTTGCCAGATA | Antisense | 1803 |
| 212877_at | 752 | 137 | 657 | AGCTTTGCCAGATATGTACTTAGTA | Antisense | 1804 |
| 212877_at | 1159 | 1083 | 692 | TATTAATAAAATCCATTTACTGTGT | Antisense | 1805 |
| 213077_at | 465 | 185 | 1831 | ACAGGTTTGATGGCACTTCTCATGA | Antisense | 1806 |
| 213077_at | 84 | 873 | 1842 | GGCACTTCTCATGATACATTTTAGT | Antisense | 1807 |
| 213077_at | 20 | 201 | 1970 | AAATCTTGAGAACCTTCTACTTTCT | Antisense | 1808 |
| 213077_at | 244 | 593 | 2029 | GAAAGTCAGCTATGATTTTGCCTAT | Antisense | 1809 |
| 213077_at | 768 | 689 | 2042 | GATTTTGCCTATAGTTCTAGTTATT | Antisense | 1810 |
| 213077_at | 580 | 607 | 2093 | GACATACCTGTAAATTGAACCTATT | Antisense | 1811 |
| 213077_at | 285 | 401 | 2132 | CTGTATGTGTATTATGGCTCTTTTC | Antisense | 1812 |
| 213077_at | 263 | 71 | 2145 | ATGGCTCTTTTCCTATTAGAGCAAC | Antisense | 1813 |
| 213077_at | 485 | 1067 | 2161 | TAGAGCAACTTGTGTTTCCCTGATA | Antisense | 1814 |
| 213077_at | 486 | 777 | 2172 | GTGTTTCCCTGATAATGTGTACATT | Antisense | 1815 |
| 213077_at | 779 | 399 | 2274 | CTGTTTTGTAATATCTAGCTCTATA | Antisense | 1816 |
| 213196_at | 648 | 387 | 5484 | CTCCCCAAGCTCCTTTAACCAGGAG | Antisense | 1817 |
| 213196_at | 1044 | 651 | 5520 | GAGTGAGCTACGTCTTGGGAGGATT | Antisense | 1818 |
| 213196_at | 72 | 881 | 5564 | GGCTAGAGTTGCTCAGATCGGCTCA | Antisense | 1819 |
| 213196_at | 592 | 267 | 5593 | AAGGCCCAGGGGTCAAAGCATTTGC | Antisense | 1820 |
| 213196_at | 507 | 521 | 5610 | GCATTTGCTCACCACAACTGAGTCT | Antisense | 1821 |
| 213196_at | 166 | 431 | 5687 | CCCCTCAGAAACGCCCTGGTGGAGG | Antisense | 1822 |
| 213196_at | 946 | 797 | 5843 | GGGAAACTTGAAGCCATCACAGCCA | Antisense | 1823 |
| 213196_at | 1059 | 979 | 5914 | TCCTTTGCCCTCACTAGGGAAGCCC | Antisense | 1824 |
| 213196_at | 965 | 409 | 5946 | CGGACTTGTCCCCATGGAGTGAAGA | Antisense | 1825 |
| 213196_at | 205 | 769 | 5964 | GTGAAGAGAGGCCCCATTTTTGAGT | Antisense | 1826 |
| 213196_at | 767 | 697 | 6008 | GTTGTGTCACTGGTGGTCATGTTGC | Antisense | 1827 |
| 213295_at | 517 | 903 | 2161 | TGGAGGGATTGTCCTTTCAAGCACC | Antisense | 1828 |
| 213295_at | 117 | 981 | 2172 | TCCTTTCAAGCACCACAGCTTCAGA | Antisense | 1829 |
| 213295_at | 225 | 735 | 2205 | GTACTTTCAAATATTGTCCACTTTA | Antisense | 1830 |
| 213295_at | 485 | 21 | 2253 | ATATTGGAGACTCAACTGCCCTTGG | Antisense | 1831 |
| 213295_at | 104 | 271 | 2291 | AATGGCCTAGTACTGTGGAATTTTA | Antisense | 1832 |
| 213295_at | 178 | 211 | 2356 | AAAGAACTCACATCCCATCTGAAAC | Antisense | 1833 |
| 213295_at | 220 | 347 | 2366 | CATCCCATCTGAAACTTCCCAGGGG | Antisense | 1834 |
| 213295_at | 102 | 991 | 2442 | TCCCATTTTTGGTATCTTGTTCAGC | Antisense | 1835 |
| 213295_at | 329 | 19 | 2480 | ATTTCTTGTCTGCAGAACATCCTAT | Antisense | 1836 |
| 213295_at | 139 | 253 | 2527 | AAGACCACCACATAGAATACCCCTT | Antisense | 1837 |
| 213295_at | 358 | 325 | 2557 | CAGCTCGCTCTGATTTAGCCTTAAT | Antisense | 1838 |
| 213547_at | 386 | 905 | 3651 | TGGTTCCTTCAGAGGGTGTCTCTGC | Antisense | 1839 |
| 213547_at | 806 | 1011 | 3755 | TCTTCACTGCATTCAGCAATGCCTG | Antisense | 1840 |
| 213547_at | 147 | 799 | 3937 | GGGAACTGGACAGGCTTGGACCTCA | Antisense | 1841 |
| 213547_at | 614 | 519 | 3950 | GCTTGGACCTCATGTTTCATTTCTA | Antisense | 1842 |
| 213547_at | 1103 | 1 | 3997 | ATTGGGCAACAATGGGCATCTTCCA | Antisense | 1843 |
| 213547_at | 248 | 227 | 4004 | AACAATGGGCATCTTCCATGCCACC | Antisense | 1844 |
| 213547_at | 878 | 461 | 4024 | CCACCACCCAGGCATAACCAGTTGG | Antisense | 1845 |
| 213547_at | 153 | 265 | 4066 | AAGGTTTCAAATGTGTCTAGTGTTC | Antisense | 1846 |
| 213547_at | 371 | 65 | 4076 | ATGTGTCTAGTGTTCAGTATTGAGG | Antisense | 1847 |
| 213547_at | 28 | 877 | 4117 | GGCAGGCCCAAGTATTTTCTGTGAT | Antisense | 1848 |
| 213547_at | 450 | 721 | 4128 | GTATTTTCTGTGATATCCCAGGTTA | Antisense | 1849 |
| 213551_x_at | 572 | 657 | 170 | GAGGTCTCAGCTCTTGGAGGAGGGC | Antisense | 1850 |
| 213551_x_at | 674 | 241 | 250 | AACCCTCACTAGCAGGACTGGTGGT | Antisense | 1851 |
| 213551_x_at | 828 | 751 | 278 | GTCTCACCTGGGGCCTAGAGTGGAA | Antisense | 1852 |
| 213551_x_at | 713 | 809 | 307 | GGGTGGGTTAACCTCACACAAGCAC | Antisense | 1853 |
| 213551_x_at | 42 | 299 | 325 | CAAGCACAGATCCCAGACTTTGCCA | Antisense | 1854 |
| 213551_x_at | 211 | 1073 | 504 | TAGGGACAGACCCTGGCAGGTCGCT | Antisense | 1855 |
| 213551_x_at | 846 | 421 | 530 | CCCACCGAGATTTCCTCAAGTGTGC | Antisense | 1856 |
| 213551_x_at | 32 | 639 | 580 | GAGACTCGAGATTCCATCATAGCGT | Antisense | 1857 |
| 213551_x_at | 1160 | 427 | 626 | CCCTGATGGGCTTGTCTGTGTTTGC | Antisense | 1858 |
| 213551_x_at | 990 | 779 | 661 | GTGTCTGAGGTCCTGTGACTGTACC | Antisense | 1859 |
| 213551_x_at | 110 | 981 | 687 | TCCTTTGCCCTGGGACATCTGTATC | Antisense | 1860 |
| 213569_at | 952 | 369 | 587 | CTAGGCTTGCTTTATCATCACATCC | Antisense | 1861 |
| 213569_at | 738 | 551 | 702 | GAATATGCAGAGGCCTTGGAGGAAG | Antisense | 1862 |
| 213569_at | 630 | 897 | 732 | TGGCAGTTATGACAGGAAGGCTCTC | Antisense | 1863 |
| 213569_at | 873 | 485 | 780 | GCCCCTGGCACTGAGCATGAGGAGC | Antisense | 1864 |
| 213569_at | 676 | 909 | 812 | TGGGGAGACTTTGCAATCACCCCCC | Antisense | 1865 |
| 213569_at | 1040 | 759 | 844 | GTCCATTTTCCACAGGTAGCTTTCT | Antisense | 1866 |
| 213569_at | 388 | 827 | 858 | GGTAGCTTTCTTGAACTCACCTTGA | Antisense | 1867 |
| 213569_at | 9 | 851 | 921 | GGAGCTGAAAGACAGTCCTGAACTG | Antisense | 1868 |
| 213569_at | 519 | 577 | 940 | GAACTGGGGGGAGCTGGGATCACAT | Antisense | 1869 |
| 213569_at | 94 | 487 | 972 | GCCCTGTCCCTCACAGGAAGTGAGA | Antisense | 1870 |
| 213569_at | 1161 | 905 | 1014 | TGGTGACTAAGGCCCCAAAGTCCCT | Antisense | 1871 |
| 213587_s_at | 569 | 87 | 208 | AGGGGAAGAAACGACAGCCTCACTT | Antisense | 1872 |
| 213587_s_at | 550 | 589 | 215 | GAAACGACAGCCTCACTTCTGTATG | Antisense | 1873 |
| 213587_s_at | 629 | 321 | 222 | CAGCCTCACTTCTGTATGGACTGCT | Antisense | 1874 |
| 213587_s_at | 784 | 999 | 232 | TCTGTATGGACTGCTGATGTGGCCT | Antisense | 1875 |
| 213587_s_at | 610 | 441 | 262 | CCTGTTCAGCGGGCATTGTCTTTGG | Antisense | 1876 |
| 213587_s_at | 3 | 1025 | 267 | TCAGCGGGCATTGTCTTTGGAGCAG | Antisense | 1877 |
| 213587_s_at | 149 | 879 | 273 | GGCATTGTCTTTGGAGCAGCAGGAG | Antisense | 1878 |
| 213587_s_at | 835 | 443 | 413 | CCTCCTGTTGGGTAAGGGTGTTGAG | Antisense | 1879 |
| 213587_s_at | 77 | 811 | 428 | GGGTGTTGAGTGTGACTTGTGCTGA | Antisense | 1880 |
| 213587_s_at | 296 | 939 | 434 | TGAGTGTGACTTGTGCTGAAAACCT | Antisense | 1881 |
| 213587_s_at | 418 | 753 | 446 | GTGCTGAAAACCTGGTTCATATATA | Antisense | 1882 |
| 213618_at | 96 | 295 | 4506 | CAATCTATATTCACAGGCCCATACT | Antisense | 1883 |
| 213618_at | 996 | 423 | 4523 | CCCATACTTCAGTCAGTCCAATCAT | Antisense | 1884 |
| 213618_at | 143 | 335 | 4532 | CAGTCAGTCCAATCATAGTACAGTG | Antisense | 1885 |
| 213618_at | 401 | 285 | 4624 | AATAGTTCACCATGGGTATGAGATA | Antisense | 1886 |
| 213618_at | 608 | 789 | 4719 | GTGGCACTATTAGGGAATCTTCCTT | Antisense | 1887 |
| 213618_at | 193 | 41 | 4877 | ATCTAGAGTTTTTACCTGCCTTATC | Antisense | 1888 |
| 213618_at | 878 | 1061 | 4889 | TACCTGCCTTATCTGAATTCTTCTT | Antisense | 1889 |
| 213618_at | 539 | 549 | 4903 | GAATTCTTCTTGAAACTTGAGCTTA | Antisense | 1890 |
| 213618_at | 303 | 1047 | 4926 | TAAACTCTAATAGCTGTTTCCCTTT | Antisense | 1891 |
| 213618_at | 56 | 1099 | 4942 | TTTCCCTTTCTATTCTGAACAACTG | Antisense | 1892 |
| 213618_at | 332 | 395 | 4956 | CTGAACAACTGTCTCCATTTTTCAA | Antisense | 1893 |
| 214131_at | 1071 | 1089 | 3000 | TTTGATGGGGACAGCCCACGTCTGA | Antisense | 1894 |
| 214131_at | 333 | 857 | 3008 | GGACAGCCCACGTCTGATAGGGTGG | Antisense | 1895 |
| 214131_at | 426 | 113 | 3050 | AGAGGGTTGTGCTCTTTCTAGTGTG | Antisense | 1896 |
| 214131_at | 1094 | 109 | 3087 | AGATGATATGTTGTAGCCACTTCTG | Antisense | 1897 |
| 214131_at | 883 | 463 | 3103 | CCACTTCTGCAGTGACGGGGACAGA | Antisense | 1898 |
| 214131_at | 698 | 649 | 3130 | GAGTCAGTGTTCTTAACTACAGTGG | Antisense | 1899 |
| 214131_at | 631 | 17 | 3218 | ATTTATTTCTTTGGTTAGTGGTGCA | Antisense | 1900 |
| 214131_at | 649 | 785 | 3235 | GTGGTGCAAGAAATTCTGTTTTCCT | Antisense | 1901 |
| 214131_at | 551 | 229 | 3301 | AACAGCTTGTAGATGCCAGACTTCA | Antisense | 1902 |
| 214131_at | 23 | 473 | 3315 | GCCAGACTTCAACAAACAGCACAGC | Antisense | 1903 |
| 214131_at | 509 | 639 | 3374 | GAGAGAGTTTGTAAGTTCTACTTCT | Antisense | 1904 |
| 214218_s_at | 949 | 761 | 423 | GTGCCAGACTTCTGAGAAGCACCTG | Antisense | 1905 |
| 214218_s_at | 173 | 303 | 452 | CAACAGCTTCCTTCTTTGAGCTTAG | Antisense | 1906 |
| 214218_s_at | 228 | 937 | 525 | TGATGACCAACTAATTCCCAAACCC | Antisense | 1907 |
| 214218_s_at | 957 | 469 | 592 | GCCACAATTGGTTTTGAAGTGCATT | Antisense | 1908 |
| 214218_s_at | 781 | 897 | 627 | TGGCATCACTACCACTACTGATTAA | Antisense | 1909 |
| 214218_s_at | 1060 | 1017 | 677 | TCATCTGCTTTATTCACATAAATGA | Antisense | 1910 |
| 214218_s_at | 631 | 289 | 741 | AATTAAGTGGCTTCGTCATTGTCCT | Antisense | 1911 |
| 214218_s_at | 1041 | 919 | 760 | TGTCCTTCTACCTCAAAGATAATTT | Antisense | 1912 |
| 214218_s_at | 743 | 771 | 898 | GTGACCACCAGAAAGTAATCTTAAG | Antisense | 1913 |
| 214218_s_at | 564 | 741 | 912 | GTAATCTTAAGCCATCTAGATGTCA | Antisense | 1914 |
| 214218_s_at | 938 | 473 | 922 | GCCATCTAGATGTCACAATTGAAAC | Antisense | 1915 |
| 214901_at | 123 | 415 | 1597 | CGAAGCCGGCGGCGTGAACAATCCT | Antisense | 1916 |
| 214901_at | 645 | 339 | 1626 | CAGGAACTCACACCTGGTTCAGCAT | Antisense | 1917 |
| 214901_at | 712 | 525 | 1678 | GCAGGCGGAGCAAAGGCAGGGCAGC | Antisense | 1918 |
| 214901_at | 919 | 865 | 1779 | GGAAGAGCCTTCTGTGGGTGCTTCC | Antisense | 1919 |
| 214901_at | 777 | 1019 | 1928 | TCATGGGTGACTTCTGACTTTCTAA | Antisense | 1920 |
| 214901_at | 234 | 359 | 1963 | CTTCCCAAGCACCCGAGGTTGGTTG | Antisense | 1921 |
| 214901_at | 549 | 833 | 1983 | GGTTGGTCCCAAATCTATCAAACTC | Antisense | 1922 |
| 214901_at | 848 | 487 | 2011 | GCCCTCTTTAGCGACATATTTTGTG | Antisense | 1923 |
| 214901_at | 724 | 1157 | 2031 | TTGTGACATTCCTTCCATTACACCA | Antisense | 1924 |
| 214901_at | 1017 | 31 | 2075 | ATAACCTACCCACCTGTGTAATGTC | Antisense | 1925 |
| 214901_at | 881 | 281 | 2106 | AATCAATATGCGGCCCCATTTTGTA | Antisense | 1926 |
| 214983_at | 802 | 701 | 4705 | GTTCCTTTTCGATTCTTGGTCTTAT | Antisense | 1927 |
| 214983_at | 1117 | 17 | 4728 | ATTTCTTCACCCATCTACTATAGTG | Antisense | 1928 |
| 214983_at | 437 | 1083 | 4746 | TATAGTGCATTCTTGCCATGCAGCC | Antisense | 1929 |
| 214983_at | 653 | 473 | 4760 | GCCATGCAGCCCTTTTTATGGAGCA | Antisense | 1930 |
| 214983_at | 238 | 189 | 4794 | ACAGCAGCTTGCTTCATTAGGGCAA | Antisense | 1931 |
| 214983_at | 221 | 843 | 4961 | GGAGGCTGCATCATGGGGAGCCATT | Antisense | 1932 |
| 214983_at | 985 | 801 | 4976 | GGGAGCCATTTTACAAGCAGCACCA | Antisense | 1933 |
| 214983_at | 390 | 1121 | 5022 | TTACATTTGTTCTGCTCTTAAGAGT | Antisense | 1934 |
| 214983_at | 110 | 273 | 5061 | AATGTGTAAGTCTGTCGTTTGTTCT | Antisense | 1935 |
| 214983_at | 707 | 755 | 5074 | GTCGTTTGTTCTTGACTTCTGTCAT | Antisense | 1936 |
| 214983_at | 719 | 277 | 5181 | AATCTCAGTTCATCAACGAATCGGT | Antisense | 1937 |
| 215314_at | 666 | 377 | 872 | CTCAGCCTCCTAAGGAGCTATTTTT | Antisense | 1938 |
| 215314_at | 661 | 763 | 1015 | GTGCCCAGCTAGATTCTTTACTTTT | Antisense | 1939 |
| 215314_at | 553 | 1079 | 1110 | TATGCCTCTTTCTGTAGATCAAATG | Antisense | 1940 |
| 215314_at | 783 | 595 | 1134 | GAAATATGGCCCAATTTACAAGGGT | Antisense | 1941 |
| 215314_at | 540 | 807 | 1155 | GGGTATACACCTTCATGGTAGATGA | Antisense | 1942 |
| 215314_at | 268 | 689 | 1217 | GATTTAATTGTAGTTTCTGCTGCCA | Antisense | 1943 |
| 215314_at | 1142 | 467 | 1238 | GCCAAAAAGTCTCCATAATTATTTT | Antisense | 1944 |
| 215314_at | 236 | 283 | 1265 | AATAACTTATAACTACCTTGATCTT | Antisense | 1945 |
| 215314_at | 1008 | 1041 | 1274 | TAACTACCTTGATCTTTACCTGTAC | Antisense | 1946 |
| 215314_at | 392 | 453 | 1280 | CCTTGATCTTTACCTGTACACACAC | Antisense | 1947 |
| 215314_at | 598 | 741 | 1330 | GTAATTTCACTTAGAATCCTGGTCA | Antisense | 1948 |
| 215359_x_at | 302 | 857 | 603 | GGACTCACACTGGAGAAAGACCCTA | Antisense | 1949 |
| 215359_x_at | 561 | 253 | 619 | AAGACCCTATGAATGTAAACACTGT | Antisense | 1950 |
| 215359_x_at | 159 | 97 | 656 | AGTCGTTCCAGTTTCTGTCGAGAAC | Antisense | 1951 |
| 215359_x_at | 179 | 917 | 726 | TGTGGGAAAGCCTTCAGTTCTCTCA | Antisense | 1952 |
| 215359_x_at | 908 | 1129 | 738 | TTCAGTTCTCTCAGTTCCTTTAATA | Antisense | 1953 |
| 215359_x_at | 1092 | 519 | 817 | GCATTCATTGGTTTTATCACATTCA | Antisense | 1954 |
| 215359_x_at | 885 | 199 | 858 | AAATCCTGTGAATGTAAACGTGGTA | Antisense | 1955 |
| 215359_x_at | 574 | 251 | 890 | AAGAAGTTTCCAGGCTGGGCGCAGC | Antisense | 1956 |
| 215359_x_at | 761 | 483 | 947 | GCCGAGGAGGGCAGATCACGAGGCC | Antisense | 1957 |
| 215359_x_at | 908 | 1063 | 1043 | TAGCCAGGCATAGTTGCTCACACCT | Antisense | 1958 |
| 215359_x_at | 860 | 75 | 1048 | AGGCATAGTTGCTCACACCTGTAGT | Antisense | 1959 |
| 215666_at | 26 | 587 | 760 | GAAAAATCCGTGGAACTGAAGCTGA | Antisense | 1960 |
| 215666_at | 830 | 167 | 774 | ACTGAAGCTGAGATCTTTAGTACGT | Antisense | 1961 |
| 215666_at | 643 | 643 | 783 | GAGATCTTTAGTACGTGGAGTCACC | Antisense | 1962 |
| 215666_at | 618 | 733 | 793 | GTACGTGGAGTCACCTTACAGATAC | Antisense | 1963 |
| 215666_at | 1159 | 845 | 799 | GGAGTCACCTTACAGATACAGAGCA | Antisense | 1964 |
| 215666_at | 560 | 1025 | 803 | TCACCTTACAGATACAGAGCATTTA | Antisense | 1965 |
| 215666_at | 373 | 631 | 819 | GAGCATTTATGCGGTATTCATTGGT | Antisense | 1966 |
| 215666_at | 288 | 1079 | 826 | TATGCGGTATTCATTGGTGCCTAAA | Antisense | 1967 |
| 215666_at | 878 | 717 | 832 | GTATTCATTGGTGCCTAAAGAACTT | Antisense | 1968 |
| 215666_at | 1006 | 209 | 848 | AAAGAACTTTAGGCATCCTCTGGAA | Antisense | 1969 |
| 215666_at | 66 | 1117 | 856 | TTAGGCATCCTCTGGAAAACCGGCC | Antisense | 1970 |
| 216438_s_at | 1086 | 185 | 150 | ACAGAGACGCAAGAGAAAAATCCAC | Antisense | 1971 |
| 216438_s_at | 546 | 277 | 168 | AATCCACTGCCTTCCAAAGAAACGA | Antisense | 1972 |
| 216438_s_at | 138 | 315 | 172 | CACTGCCTTCCAAAGAAACGATTGA | Antisense | 1973 |
| 216438_s_at | 670 | 849 | 200 | GGAGAAGCAAGCAGGCGAATCGTAA | Antisense | 1974 |
| 216438_s_at | 49 | 135 | 209 | AGCAGGCGAATCGTAATGAGGCGTG | Antisense | 1975 |
| 216438_s_at | 556 | 957 | 245 | TGCACTGTACATTCCACAAGCATTG | Antisense | 1976 |
| 216438_s_at | 569 | 167 | 248 | ACTGTACATTCCACAAGCATTGCCT | Antisense | 1977 |
| 216438_s_at | 9 | 109 | 308 | AGATGCAAAGAGGTTGGATCAAGTT | Antisense | 1978 |
| 216438_s_at | 178 | 259 | 328 | AAGTTTAAATGACTGTGCTGCCCCT | Antisense | 1979 |
| 216438_s_at | 744 | 591 | 426 | GAAAGAACTTGCATGTTGGTGAAGG | Antisense | 1980 |
| 216438_s_at | 432 | 499 | 516 | GCTGTAATGCAGTTTAATCAGAGTG | Antisense | 1981 |
| 216540_at | 167 | 635 | 37 | GAGAAGAAGTCCCCAACATGACTGT | Antisense | 1982 |
| 216540_at | 206 | 529 | 134 | GCAGTGGGTGTCCAGAGCAAACAAA | Antisense | 1983 |
| 216540_at | 837 | 251 | 159 | AAGAACTTATTTTGGCTGGACAGCA | Antisense | 1984 |
| 216540_at | 966 | 855 | 176 | GGACAGCAAGCAGAGTGCCAGTTCC | Antisense | 1985 |
| 216540_at | 201 | 113 | 187 | AGAGTGCCAGTTCCAAAGATGAGCT | Antisense | 1986 |
| 216540_at | 644 | 671 | 204 | GATGAGCTTGTTTGTAGCACCACCA | Antisense | 1987 |
| 216540_at | 479 | 741 | 246 | GTAATACATGGCTGAGTCTTCCTCT | Antisense | 1988 |
| 216540_at | 1134 | 499 | 256 | GCTGAGTCTTCCTCTTGAGCAAATG | Antisense | 1989 |
| 216540_at | 85 | 633 | 272 | GAGCAAATGGTTTCTTCAGGTGGAA | Antisense | 1990 |
| 216540_at | 969 | 815 | 290 | GGTGGAAAGATGTCTCGCCTTTGTT | Antisense | 1991 |
| 216540_at | 1120 | 751 | 301 | GTCTCGCCTTTGTTAAGGTCAGCAG | Antisense | 1992 |
| 216958_s_at | 460 | 925 | 2111 | TGTAATCCCAGTTACACAGAAGACT | Antisense | 1993 |
| 216958_s_at | 471 | 661 | 2294 | GAGGACAGCGTGCTTTTGTGTACTG | Antisense | 1994 |
| 216958_s_at | 1037 | 139 | 2300 | AGCGTGCTTTTGTGTACTGTTGGAA | Antisense | 1995 |
| 216958_s_at | 614 | 465 | 2408 | CCACAGCTGACTGGGCAGCAGGCAC | Antisense | 1996 |
| 216958_s_at | 34 | 947 | 2415 | TGACTGGGCAGCAGGCACAGGCCCT | Antisense | 1997 |
| 216958_s_at | 424 | 159 | 2440 | ACCCGAGCAGGCCGGAGTTGGCTCG | Antisense | 1998 |
| 216958_s_at | 533 | 415 | 2443 | CGAGCAGGCCGGAGTTGGCTCGCAT | Antisense | 1999 |
| 216958_s_at | 816 | 391 | 2482 | CTGCCTGTGTACATTTCTCCAGATA | Antisense | 2000 |
| 216958_s_at | 306 | 179 | 2492 | ACATTTCTCCAGATACCCTATGGCT | Antisense | 2001 |
| 216958_s_at | 1090 | 457 | 2500 | CCAGATACCCTATGGCTAATTTTGT | Antisense | 2002 |
| 216958_s_at | 57 | 881 | 2513 | GGCTAATTTTGTTATAACTGCACAG | Antisense | 2003 |
| 217147_s_at | 440 | 1003 | 1036 | TCTCCTTTCTCACCAATGGGCAATA | Antisense | 2004 |
| 217147_s_at | 398 | 981 | 1038 | TCCTTTCTCACCAATGGGCAATAGC | Antisense | 2005 |
| 217147_s_at | 256 | 1087 | 1149 | TATTTTTCCCAAAGATAGCTTTACT | Antisense | 2006 |
| 217147_s_at | 565 | 743 | 1186 | GTCAAATTAATGCATGCTCCTTACA | Antisense | 2007 |
| 217147_s_at | 863 | 275 | 1194 | AATGCATGCTCCTTACAACAAACAA | Antisense | 2008 |
| 217147_s_at | 1061 | 53 | 1199 | ATGCTCCTTACAACAAACAAATATC | Antisense | 2009 |
| 217147_s_at | 559 | 647 | 1229 | GAGTTTAGGAATTCTACTAGCCAGA | Antisense | 2010 |
| 217147_s_at | 368 | 173 | 1244 | ACTAGCCAGAGATAGTCACTTGGAG | Antisense | 2011 |
| 217147_s_at | 635 | 685 | 1254 | GATAGTCACTTGGAGAAACTTTCTA | Antisense | 2012 |
| 217147_s_at | 69 | 589 | 1268 | GAAACTTTCTATATATCCTTCTAAA | Antisense | 2013 |
| 217147_s_at | 102 | 319 | 1480 | CACCCCACTGATAACCAAATCACAG | Antisense | 2014 |
| 217778_at | 547 | 1073 | 1551 | TAGGGACTGGCGCCAAATGGTCTCT | Antisense | 2015 |
| 217778_at | 520 | 467 | 1581 | CCAATTTTGGTATCTTCTCTGGCCT | Antisense | 2016 |
| 217778_at | 32 | 381 | 1657 | CTCTTTCTCAAAGCACAGTAATGTG | Antisense | 2017 |
| 217778_at | 915 | 131 | 1698 | AGCACCTCAGTGAAGGGGGCCTGCT | Antisense | 2018 |
| 217778_at | 98 | 811 | 1778 | GGGGTAGGAGGAAGGTTGTTAGCAT | Antisense | 2019 |
| 217778_at | 246 | 1155 | 1793 | TTGTTAGCATCTACTGCTGCCGTAC | Antisense | 2020 |
| 217778_at | 567 | 393 | 1806 | CTGCTGCCGTACCCTAGGAATATGG | Antisense | 2021 |
| 217778_at | 631 | 605 | 1832 | GACATGGACATGGTGTCCCATGCCC | Antisense | 2022 |
| 217778_at | 1158 | 779 | 1844 | GTGTCCCATGCCCAGATGATAAACA | Antisense | 2023 |
| 217778_at | 545 | 59 | 1859 | ATGATAAACACTGAGCTGCCAAAAC | Antisense | 2024 |
| 217778_at | 750 | 191 | 1866 | ACACTGAGCTGCCAAAACATTTTTT | Antisense | 2025 |
| 218553_s_at | 1081 | 95 | 2857 | AGTCCTGTCTGTGTGGACTGGCACC | Antisense | 2026 |
| 218553_s_at | 804 | 533 | 2928 | GCACGTTACCTCAGGAATGGGCCCC | Antisense | 2027 |
| 218553_s_at | 376 | 345 | 2955 | CATGAAGGGGCCCATCTGTCAGCAG | Antisense | 2028 |
| 218553_s_at | 560 | 929 | 3059 | TGTTACACTAGCCTGCCGATGAGAC | Antisense | 2029 |
| 218553_s_at | 942 | 483 | 3073 | GCCGATGAGACCCAGACACAGGCAG | Antisense | 2030 |
| 218553_s_at | 971 | 357 | 3108 | CTTGACCCCTGATTCCAGTGAGGAC | Antisense | 2031 |
| 218553_s_at | 441 | 317 | 3170 | CACGACAGGCCCAAAGATGGACCCC | Antisense | 2032 |
| 218553_s_at | 218 | 987 | 3213 | TCCCCAAGTGTTCTCCGGTGGAGAA | Antisense | 2033 |
| 218553_s_at | 756 | 37 | 3272 | ATCACCATCCTGTGTACAATGGCTG | Antisense | 2034 |
| 218553_s_at | 1040 | 729 | 3296 | GTAGACTTGTATATGGCTCCTTTAA | Antisense | 2035 |
| 218553_s_at | 681 | 781 | 3358 | GTGTGAACACATTGCGTTCCCAGTC | Antisense | 2036 |
| 218723_s_at | 997 | 167 | 380 | ACTGAATTCTCCAACAGACTCTACC | Antisense | 2037 |
| 218723_s_at | 612 | 463 | 421 | CCACTGTCACTCCTCAGAAAGCTAA | Antisense | 2038 |
| 218723_s_at | 673 | 573 | 468 | GAAGCCTTCATTGCTGATCTTGACA | Antisense | 2039 |
| 218723_s_at | 644 | 997 | 523 | TCTGGGTCCTTTCATCATAAGGGAG | Antisense | 2040 |
| 218723_s_at | 837 | 473 | 550 | GCTTCAGAAAGTTCCGAGGACCTGC | Antisense | 2041 |
| 218723_s_at | 200 | 661 | 565 | GAGGACCTGCTAAAATCAGCTACTA | Antisense | 2042 |
| 218723_s_at | 641 | 1023 | 580 | TCAGCTACTAGAATCTGCTGCCAGA | Antisense | 2043 |
| 218723_s_at | 472 | 859 | 607 | GGACAAAGACGTGCACTCAACCTTC | Antisense | 2044 |
| 218723_s_at | 757 | 339 | 646 | CAGGCTCACCTTAAAATCAGCCCTT | Antisense | 2045 |
| 218723_s_at | 817 | 581 | 734 | GAACAGACGATCCATGCTAATATTG | Antisense | 2046 |
| 218723_s_at | 281 | 1065 | 841 | TAGCAGTAAGCTTTCCCATTATAAT | Antisense | 2047 |
| 218786_at | 423 | 967 | 6459 | TGCTGGCTGGCCATTTACTTCCAGC | Antisense | 2048 |
| 218786_at | 381 | 459 | 6479 | CCAGCCCTTATGAGGAGTTTCCCCT | Antisense | 2049 |
| 218786_at | 805 | 449 | 6553 | CCTTACCGGCTCCATATGGGGTACA | Antisense | 2050 |
| 218786_at | 828 | 1023 | 6592 | TCACCCCAACTTGGGAAACCCTCTG | Antisense | 2051 |
| 218786_at | 1024 | 389 | 6629 | CTCCAGAGCCCCTTGTGGGGTCAGT | Antisense | 2052 |
| 218786_at | 834 | 335 | 6650 | CAGTGAGACCTCATTGTGGCCACAT | Antisense | 2053 |
| 218786_at | 497 | 3 | 6662 | ATTGTGGCCACATTACAGCCCAGTG | Antisense | 2054 |
| 218786_at | 252 | 319 | 6763 | CACCTCAGTATCTGCTTTCGGGGAA | Antisense | 2055 |
| 218786_at | 38 | 1081 | 6771 | TATCTGCTTTCGGGGAACCCAACCT | Antisense | 2056 |
| 218786_at | 599 | 335 | 6819 | CAGTCCTGCAGGTTTGAACTCTGAC | Antisense | 2057 |
| 218786_at | 1007 | 609 | 6850 | GACTTTTCCAGTTATCTCGTGGAAT | Antisense | 2058 |
| 218838_s_at | 1101 | 795 | 1858 | GGGCATGGTAATTAGCCTTTCCCCA | Antisense | 2059 |
| 218838_s_at | 49 | 295 | 1904 | CAAGGGTCAACTGAATTCCCCACTT | Antisense | 2060 |
| 218838_s_at | 60 | 935 | 1944 | TGATCTCCTTTTAATTTCACGTCTA | Antisense | 2061 |
| 218838_s_at | 90 | 1127 | 1959 | TTCACGTCTAAGATCCTGGCAGCTT | Antisense | 2062 |
| 218838_s_at | 668 | 983 | 2006 | TCCTGCTGGGACTGTCAGCTCATTT | Antisense | 2063 |
| 218838_s_at | 1043 | 933 | 2108 | TGATTATTGCTGCCCTGTGGGTCTT | Antisense | 2064 |
| 218838_s_at | 313 | 749 | 2128 | GTCTTGCTCAATACTGTTCATACCT | Antisense | 2065 |
| 218838_s_at | 83 | 1075 | 2223 | TAGGCCCCTTAAATACTGTGTAGCA | Antisense | 2066 |
| 218838_s_at | 716 | 351 | 2261 | CATTACCAGCTGGGTCACCTTGGAT | Antisense | 2067 |
| 218838_s_at | 191 | 745 | 2274 | GTCACCTTGGATGGGTCTGTCAACA | Antisense | 2068 |
| 218838_s_at | 1033 | 653 | 2330 | GAGGGTAGTCCCTACCTCATAAGGG | Antisense | 2069 |
| 218956_s_at | 1109 | 1137 | 2115 | TTCCATAGGCCGATGCTCTGAAAGA | Antisense | 2070 |
| 218956_s_at | 508 | 637 | 2141 | GAGACGTGGGGCTCGAGAGATTTAA | Antisense | 2071 |
| 218956_s_at | 399 | 409 | 2374 | CGGCCCTGCAACGGAGGAGGACAGT | Antisense | 2072 |
| 218956_s_at | 483 | 659 | 2387 | GAGGAGGACAGTGAGACGATGCCAC | Antisense | 2073 |
| 218956_s_at | 106 | 433 | 2425 | CCCCTGCACACTCACATATGTGGCA | Antisense | 2074 |
| 218956_s_at | 218 | 391 | 2467 | CTGCCACCATGCCATATAGGGACAC | Antisense | 2075 |
| 218956_s_at | 1031 | 1055 | 2483 | TAGGGACACACCTCAGAAACCCTTC | Antisense | 2076 |
| 218956_s_at | 1015 | 451 | 2503 | CCTTCCTTGACAGCTCTGGACAGGG | Antisense | 2077 |
| 218956_s_at | 242 | 583 | 2527 | GAAAATTTGGCTCCCTCATGAAGGT | Antisense | 2078 |
| 218956_s_at | 728 | 503 | 2559 | GCTGCTGTTGACACCGAGGTTACAT | Antisense | 2079 |
| 218956_s_at | 570 | 61 | 2603 | ATGTTCTGCAAATCCAACACACGTT | Antisense | 2080 |
| 219343_at | 141 | 605 | 957 | GACAGTTCAGAATCATGTTCCCCAT | Antisense | 2081 |
| 219343_at | 842 | 987 | 975 | TCCCCATTCTGGTGTTGGATCTATA | Antisense | 2082 |
| 219343_at | 61 | 553 | 1009 | GAATCCTTACCACAGAGTCCAGATT | Antisense | 2083 |
| 219343_at | 807 | 333 | 1039 | CAGTATTCTATCAGTACAGCTCTCT | Antisense | 2084 |
| 219343_at | 201 | 507 | 1057 | GCTCTCTGCAGCTTAAACTCGGTGG | Antisense | 2085 |
| 219343_at | 869 | 253 | 1133 | AAGACTGCTGAGGCCAAGTGCTATT | Antisense | 2086 |
| 219343_at | 561 | 233 | 1176 | AACTTGGCTATTTTCTTGACACTTT | Antisense | 2087 |
| 219343_at | 789 | 1037 | 1277 | TAATGTGCTGCTAGGTTTTTTGTTT | Antisense | 2088 |
| 219343_at | 916 | 19 | 1373 | ATTTGCCTTTAATCTTATTGTTCTC | Antisense | 2089 |
| 219343_at | 765 | 577 | 1445 | GAACTGGTTGATTCTGGGAGGCATC | Antisense | 2090 |
| 219343_at | 464 | 905 | 1490 | TGGATATGTACATGTCCTATTCTAC | Antisense | 2091 |
| 219368_at | 427 | 93 | 1968 | AGTGTTGTGTAGCTTAATCCTTCTG | Antisense | 2092 |
| 219368_at | 214 | 927 | 1975 | TGTAGCTTAATCCTTCTGAAGTCTT | Antisense | 2093 |
| 219368_at | 1020 | 923 | 2002 | TGTCATGTAGCTATTAATCTGTGGC | Antisense | 2094 |
| 219368_at | 184 | 1103 | 2160 | TTTAATTTTGTTGTGCCTGCTTCAT | Antisense | 2095 |
| 219368_at | 195 | 763 | 2172 | GTGCCTGCTTCATTTTGCAATAACA | Antisense | 2096 |
| 219368_at | 1027 | 549 | 2247 | GAATTTCAGGCAAAACTACATTTAT | Antisense | 2097 |
| 219368_at | 17 | 1045 | 2278 | TAACAGCTTGTTCATAGGCTCTTGT | Antisense | 2098 |
| 219368_at | 466 | 1 | 2350 | ATTGTTTGTCGGTGAAGTGTTAGTC | Antisense | 2099 |
| 219368_at | 599 | 303 | 2385 | CAAAAGTTTGCACATATTGTTCTGT | Antisense | 2100 |
| 219368_at | 1054 | 1005 | 2443 | TCTCTTTTCCTATTACATCATTCAT | Antisense | 2101 |
| 219368_at | 1061 | 261 | 2471 | AAGTGATCACTTTACCATTTTGAAA | Antisense | 2102 |
| 219551_at | 696 | 579 | 285 | GAACAGGTGACCATAACTCTGCCAA | Antisense | 2103 |
| 219551_at | 242 | 67 | 370 | ATGTGGAATTCAGCCAGGACTCCCA | Antisense | 2104 |
| 219551_at | 56 | 473 | 382 | GCCAGGACTCCCAATCTTGTAAAAC | Antisense | 2105 |
| 219551_at | 709 | 107 | 420 | AGATAAGATGTCCCCAGCATCTCCA | Antisense | 2106 |
| 219551_at | 925 | 103 | 511 | AGTTCATCAGATTCCAAAAGTTCAT | Antisense | 2107 |
| 219551_at | 263 | 259 | 528 | AAGTTCATCATCTTCAAGTAGTGAG | Antisense | 2108 |
| 219551_at | 877 | 693 | 580 | GATTGCAAATCCTCTACTTCTGATA | Antisense | 2109 |
| 219551_at | 470 | 547 | 609 | GAATTGTGTCTCAGGACATCCTACC | Antisense | 2110 |
| 219551_at | 976 | 605 | 623 | GACATCCTACCATGACACAGTACAG | Antisense | 2111 |
| 219551_at | 529 | 107 | 676 | AGATTTCGAGACAACAGTGGCCTTC | Antisense | 2112 |
| 219551_at | 542 | 185 | 689 | ACAGTGGCCTTCTGATGAATACTTT | Antisense | 2113 |
| 219844_at | 717 | 39 | 597 | ATCAGGCACACTTTCTTCAGAGGCA | Antisense | 2114 |
| 219844_at | 399 | 729 | 647 | GTAGACGGGGTGGCATCATGGCATC | Antisense | 2115 |
| 219844_at | 640 | 897 | 665 | TGGCATCTTTATATACATCCCATCC | Antisense | 2116 |
| 219844_at | 510 | 1053 | 678 | TACATCCCATCCAGCTGACAATGGA | Antisense | 2117 |
| 219844_at | 444 | 1053 | 740 | TACAGGCTGTTTTGGAGGATACGTT | Antisense | 2118 |
| 219844_at | 665 | 585 | 861 | GAAAACCTAAAACAAGCCTCTTGCT | Antisense | 2119 |
| 219844_at | 849 | 183 | 907 | ACAGGAGTAGGTGCCACTGACCTCT | Antisense | 2120 |
| 219844_at | 73 | 169 | 922 | ACTGACCTCTATTGTTGGAGACTTT | Antisense | 2121 |
| 219844_at | 579 | 975 | 949 | TCCACTTTTTGTTTCAGCCAGTAAA | Antisense | 2122 |
| 219844_at | 1028 | 1089 | 976 | TATTGTTTTGCTTCATCTGTACACA | Antisense | 2123 |
| 219844_at | 367 | 603 | 1091 | GACAGCCTGTCATTGAATCTAAACA | Antisense | 2124 |
| 219901_at | 180 | 133 | 1257 | AGCAGAGGATGCTCATTCGGCTCAG | Antisense | 2125 |
| 219901_at | 656 | 673 | 1264 | GATGCTCATTCGGCTCAGAAGTGGA | Antisense | 2126 |
| 219901_at | 566 | 571 | 1291 | GAAGCATTTCAGGAAGGCACAATAT | Antisense | 2127 |
| 219901_at | 134 | 731 | 1317 | GTAGCAGTATTGGTTTCATCTCTTC | Antisense | 2128 |
| 219901_at | 930 | 715 | 1329 | GTTTCATCTCTTCTGTGATTCCAAA | Antisense | 2129 |
| 219901_at | 847 | 467 | 1415 | GCCAAGATAAAGCCAACCAGACCCT | Antisense | 2130 |
| 219901_at | 446 | 467 | 1427 | CCAACCAGACCCTTCATCAAAGAAA | Antisense | 2131 |
| 219901_at | 1071 | 1085 | 1545 | TATTTCTGAGACACACTGAATTCTA | Antisense | 2132 |
| 219901_at | 65 | 723 | 1612 | GTATACTGTATTAACTATTCGTGAC | Antisense | 2133 |
| 219901_at | 515 | 607 | 1634 | GACATAGTTCACACTGTTTTCTTAC | Antisense | 2134 |
| 219901_at | 23 | 1097 | 1725 | TTTCCACAAAGTGCTTGGTTTAGGA | Antisense | 2135 |
| 220005_at | 868 | 1131 | 2287 | TTCTTGCATCCTTCTGTGATTCAAA | Antisense | 2136 |
| 220005_at | 802 | 925 | 2392 | TGTAAATGTGCCACGAGCTCCAACA | Antisense | 2137 |
| 220005_at | 394 | 139 | 2407 | AGCTCCAACACGACCATCGTAGGGT | Antisense | 2138 |
| 220005_at | 739 | 965 | 2423 | TCGTAGGGTGAAGCCCACGTTTTCT | Antisense | 2139 |
| 220005_at | 1152 | 347 | 2456 | CTCAAAGGCCCTAGAACTTGCCTAC | Antisense | 2140 |
| 220005_at | 416 | 51 | 2508 | ATCCATCTCTTGAACTTTATACTCT | Antisense | 2141 |
| 220005_at | 993 | 589 | 2631 | GAAACCCTATGTTGTCATCACTTGG | Antisense | 2142 |
| 220005_at | 817 | 199 | 2662 | AAATATTACCTGGCCAATATCCCAC | Antisense | 2143 |
| 220005_at | 997 | 383 | 2714 | CTCTGTATGCTGTCACACCTATATT | Antisense | 2144 |
| 220005_at | 592 | 355 | 2757 | CATTGTAATTACTTCCTGACCTTTG | Antisense | 2145 |
| 220005_at | 837 | 943 | 2773 | TGACCTTTGTATCTACTCTTTTAGT | Antisense | 2146 |
| 220168_at | 1103 | 285 | 1229 | AATATCTTTCCTACTAGACACTCTC | Antisense | 2147 |
| 220168_at | 19 | 249 | 1299 | AAGCTTATCGACAGATGGCCCTACT | Antisense | 2148 |
| 220168_at | 373 | 487 | 1316 | GCCCTACTAAGTTCTGCTTTTGCAT | Antisense | 2149 |
| 220168_at | 327 | 849 | 1347 | GGAGCAAGTGGAACCTACTATGTAA | Antisense | 2150 |
| 220168_at | 1030 | 941 | 1423 | TGAGAATCCTAATTGGGCCCTTTTA | Antisense | 2151 |
| 220168_at | 714 | 773 | 1494 | GTGAGGCATTTTCTGAAGCACTTAA | Antisense | 2152 |
| 220168_at | 75 | 717 | 1531 | GTTTCATTCTACTTTATATCACATG | Antisense | 2153 |
| 220168_at | 503 | 593 | 1588 | GAAAGTCAGGAGTTCCAACTGTCAG | Antisense | 2154 |
| 220168_at | 749 | 301 | 1603 | CAACTGTCAGTTTGTCAACTCTGTG | Antisense | 2155 |
| 220168_at | 211 | 373 | 1644 | CTACCAGATTGCTCAGCTACTCCTA | Antisense | 2156 |
| 220168_at | 550 | 185 | 1721 | ACAGGTATTTCTGCAACACAATGTA | Antisense | 2157 |
| 220241_at | 566 | 419 | 1596 | CGCCAGTACATCTTCTAGCATTGTC | Antisense | 2158 |
| 220241_at | 992 | 333 | 1599 | CAGTACATCTTCTAGCATTGTCGTG | Antisense | 2159 |
| 220241_at | 732 | 1133 | 1628 | TTCTCCGAATCCTGGTTTTGATTGG | Antisense | 2160 |
| 220241_at | 449 | 553 | 1634 | GAATCCTGGTTTTGATTGGTCAGAT | Antisense | 2161 |
| 220241_at | 1112 | 905 | 1640 | TGGTTTTGATTGGTCAGATTCTTTT | Antisense | 2162 |
| 220241_at | 403 | 1111 | 1804 | TTAACGGTAATTCTCAAACTATGTG | Antisense | 2163 |
| 220241_at | 1087 | 825 | 1809 | GGTAATTCTCAAACTATGTGTTATT | Antisense | 2164 |
| 220241_at | 750 | 35 | 1849 | ATAATCTCTTTCACTGAAATCTTGT | Antisense | 2165 |
| 220241_at | 65 | 315 | 1860 | CACTGAAATCTTGTGATCCATTCTT | Antisense | 2166 |
| 220241_at | 204 | 41 | 1867 | ATCTTGTGATCCATTCTTTACCTTT | Antisense | 2167 |
| 220241_at | 576 | 1011 | 1881 | TCTTTACCTTTCCATTTTAATAATG | Antisense | 2168 |
| 220301_at | 373 | 35 | 1467 | ATAAGTCATTTCTAATCTTTGTATA | Antisense | 2169 |
| 220301_at | 603 | 605 | 1572 | GACAGGCTGTAAGCATCGCTGAGAA | Antisense | 2170 |
| 220301_at | 1151 | 77 | 1603 | AGGACTTTTGACTTTTATCTGGATA | Antisense | 2171 |
| 220301_at | 333 | 39 | 1645 | ATCATGGAAAGGCATCAGCATTGCA | Antisense | 2172 |
| 220301_at | 931 | 519 | 1675 | GCATCTAGGTAGAAATCAGGCCAAA | Antisense | 2173 |
| 220301_at | 70 | 303 | 1696 | CAAAATTAAGCTGTGGTTTCCCTCT | Antisense | 2174 |
| 220301_at | 417 | 829 | 1710 | GGTTTCCCTCTGAGTAGTGGGAATA | Antisense | 2175 |
| 220301_at | 313 | 253 | 1851 | AAGACACTTATAATTTTCCATACCT | Antisense | 2176 |
| 220301_at | 975 | 15 | 1863 | ATTTTCCATACCTATTTTCAACTGA | Antisense | 2177 |
| 220301_at | 1035 | 543 | 1890 | GCAACTTGTAAGATTTAACTCAGTC | Antisense | 2178 |
| 220301_at | 759 | 293 | 1914 | CAATAACATACTGGTTTTACTCATC | Antisense | 2179 |
| 220933_s_at | 134 | 699 | 1751 | GTTGTTTACTGAATCCTGGTGTGAA | Antisense | 2180 |
| 220933_s_at | 1142 | 371 | 1800 | CTACTGCTGTACTTCCGATTTACGG | Antisense | 2181 |
| 220933_s_at | 6 | 649 | 1867 | GAGTACCTATTTATGTGGGCCTTCA | Antisense | 2182 |
| 220933_s_at | 677 | 783 | 1881 | GTGGGCCTTCAGTGGATGGGCAGTG | Antisense | 2183 |
| 220933_s_at | 169 | 197 | 1990 | ACAAGTAGTCCTGTTTGCCACTAAA | Antisense | 2184 |
| 220933_s_at | 132 | 711 | 2114 | GTTATCTCTGCCAGTCACAAGTGTG | Antisense | 2185 |
| 220933_s_at | 35 | 197 | 2130 | ACAAGTGTGGCTGGTGTCATTCTGG | Antisense | 2186 |
| 220933_s_at | 498 | 1015 | 2146 | TCATTCTGGGTCTGACTGGAGCCCT | Antisense | 2187 |
| 220933_s_at | 496 | 387 | 2169 | CTCCTGGACTGTTTCTTTAATTTCA | Antisense | 2188 |
| 220933_s_at | 166 | 145 | 2196 | AGCCCTGCAGACATAGTACCTGGTC | Antisense | 2189 |
| 220933_s_at | 315 | 1061 | 2212 | TACCTGGTCAGAACTATGCCTCGGT | Antisense | 2190 |
| 221205_at | 764 | 211 | 1553 | AAAGCTTATCCACCACGATTAAGCC | Antisense | 2191 |
| 221205_at | 519 | 321 | 1563 | CACCACGATTAAGCCGGCTTCATCC | Antisense | 2192 |
| 221205_at | 1007 | 545 | 1595 | GCAAGGCTGGTTCAGCATACACAAA | Antisense | 2193 |
| 221205_at | 349 | 223 | 1659 | AAAAGCCACATGATATTTACCTGTA | Antisense | 2194 |
| 221205_at | 152 | 935 | 1669 | TGATATTTACCTGTATACCTTTTTA | Antisense | 2195 |
| 221205_at | 355 | 499 | 1711 | GCTGTCATTATTTATGCTAACACTG | Antisense | 2196 |
| 221205_at | 211 | 509 | 1726 | GCTAACACTGGTTTTGTGTCCCTGG | Antisense | 2197 |
| 221205_at | 72 | 781 | 1741 | GTGTCCCTGGAATCTATCTATCTAA | Antisense | 2198 |
| 221205_at | 436 | 1111 | 1786 | TTTTCCATTTTCCAGTACCTATTAG | Antisense | 2199 |
| 221205_at | 638 | 121 | 1809 | AGACAGAATGGCTTTCAATTTTTTC | Antisense | 2200 |
| 221205_at | 310 | 1099 | 1830 | TTTCTCTTACTTCCAAACTTAGTCA | Antisense | 2201 |
| 221728_x_at | 1005 | 15 | 7681 | ATTTTCTAGTTTTCATTCTGTACAT | Antisense | 2202 |
| 221728_x_at | 576 | 449 | 7743 | CCTTTCAATGTGTGGTATCAGCTGG | Antisense | 2203 |
| 221728_x_at | 329 | 1081 | 7758 | TATCAGCTGGACTCAGTAACACCCC | Antisense | 2204 |
| 221728_x_at | 40 | 1101 | 7784 | TTTCTTCAGCTGGGGATGGGGAATG | Antisense | 2205 |
| 221728_x_at | 1028 | 1043 | 7840 | TAAAAGCCTTCCTTTCACAGTTTCT | Antisense | 2206 |
| 221728_x_at | 232 | 1029 | 7854 | TCACAGTTTCTGGCATCACTACCAC | Antisense | 2207 |
| 221728_x_at | 485 | 1115 | 7908 | TTATCATCATCTGCTTTATTCACAT | Antisense | 2208 |
| 221728_x_at | 893 | 11 | 7979 | ATTAAGTGGCTTCGTCATTGTCCTT | Antisense | 2209 |
| 221728_x_at | 666 | 1015 | 7993 | TCATTGTCCTTCTACCTCAAAGATA | Antisense | 2210 |
| 221728_x_at | 151 | 45 | 8082 | ATCTCTTTTGAGTCTTTGCTGTTTG | Antisense | 2211 |
| 221728_x_at | 28 | 1155 | 8122 | TTGTTCAGCATGGGTGACCACCAGA | Antisense | 2212 |
| 221759_at | 41 | 323 | 917 | CAGCCTAGCCTTCAAGTGGTGTGAG | Antisense | 2213 |
| 221759_at | 257 | 817 | 934 | GGTGTGAGCGGCCTGAGTGGATACA | Antisense | 2214 |
| 221759_at | 670 | 91 | 949 | AGTGGATACACGTGGATAGCCGGCC | Antisense | 2215 |
| 221759_at | 534 | 971 | 977 | TGCCTCCCTGAGCCGTGACTCAGGG | Antisense | 2216 |
| 221759_at | 709 | 367 | 1040 | CTATGCCCAGGTGCGTCGGGCACAG | Antisense | 2217 |
| 221759_at | 179 | 127 | 1078 | AGAAGATAGCCTGCCTTGTGCTGGC | Antisense | 2218 |
| 221759_at | 673 | 1025 | 1150 | TCAGCCTCTTCTACATTTTCAATTT | Antisense | 2219 |
| 221759_at | 489 | 385 | 1212 | CTCGTGCCCTGGGCAGTGCACATGT | Antisense | 2220 |
| 221759_at | 945 | 875 | 1223 | GGCAGTGCACATGTTCAGTGCCCAG | Antisense | 2221 |
| 221759_at | 892 | 307 | 1306 | CACAAAGCCAACACTCTGTGACCAC | Antisense | 2222 |
| 221759_at | 443 | 485 | 1417 | GCCCCAAAGATGGGCCTTCTCTCTC | Antisense | 2223 |
| 221789_x_at | 563 | 1135 | 3835 | TTCTCACTCTACAGGGTCCTGGTGA | Antisense | 2224 |
| 221789_x_at | 1034 | 951 | 3857 | TGAAGAGCCAGTGAGGCCCCTGGTA | Antisense | 2225 |
| 221789_x_at | 346 | 959 | 3928 | TGCAGGGGCAGCACAGCTGGGGTGC | Antisense | 2226 |
| 221789_x_at | 595 | 1001 | 4016 | TCTGCAGCGGGGCCTTATGCTGCCA | Antisense | 2227 |
| 221789_x_at | 563 | 875 | 4082 | GGCAGGTGGCTGAGCAGGAGCTCCC | Antisense | 2228 |
| 221789_x_at | 220 | 319 | 4137 | CACCCCTGGGCATCATGTGTGTGGG | Antisense | 2229 |
| 221789_x_at | 171 | 339 | 4173 | CAGGTGTGGGAGCTGGTGACCCCAG | Antisense | 2230 |
| 221789_x_at | 80 | 111 | 4196 | AGACCCAGAATTCTCAGGGCTCTAC | Antisense | 2231 |
| 221789_x_at | 507 | 367 | 4225 | CTTTCCTGGTCCTAGGTGGCCAGTG | Antisense | 2232 |
| 221789_x_at | 886 | 483 | 4322 | GCCGTTTCCGTGGTTGTAGCAGAGG | Antisense | 2233 |
| 221789_x_at | 217 | 661 | 4343 | GAGGACCGGAGGTTGGGTTCCTGAT | Antisense | 2234 |
| 221874_at | 711 | 407 | 5130 | CTGGCCTACGTGTTCAATTTTCTAT | Antisense | 2235 |
| 221874_at | 349 | 305 | 5158 | CAAAGGCTTTAGTCCTTGACCCAGG | Antisense | 2236 |
| 221874_at | 1021 | 455 | 5178 | CCAGGGCTAAAGTGGTCTGTCCAAG | Antisense | 2237 |
| 221874_at | 557 | 263 | 5187 | AAGTGGTCTGTCCAAGCTGTTGTTG | Antisense | 2238 |
| 221874_at | 867 | 785 | 5330 | GTGGTGTATTCAAGCAGTAGGGTTT | Antisense | 2239 |
| 221874_at | 1042 | 1105 | 5391 | TTTTTGTCTGACTACATTAAAGATA | Antisense | 2240 |
| 221874_at | 1043 | 119 | 5416 | AGACTGACTATATTTATACAACAGA | Antisense | 2241 |
| 221874_at | 1037 | 1023 | 5460 | TCAGCTTTGTGAAATCGAATTTTTT | Antisense | 2242 |
| 221874_at | 887 | 979 | 5506 | TCCTTTTTACCCTGTAATCCAAGCG | Antisense | 2243 |
| 221874_at | 1052 | 1059 | 5513 | TACCCTGTAATCCAAGCGTTAATAG | Antisense | 2244 |
| 221874_at | 111 | 567 | 5545 | GAAGATGGGTTATTGCATGTCACTT | Antisense | 2245 |
| 221905_at | 3 | 997 | 4804 | TCTGGGTTTAGGGCTAGCCCTGCCT | Antisense | 2246 |
| 221905_at | 345 | 1009 | 4884 | TCTAGCTCTGACAGCCTAGAAGTCC | Antisense | 2247 |
| 221905_at | 699 | 809 | 4947 | GGGTGAATGAGCTTGTCAATGTGAT | Antisense | 2248 |
| 221905_at | 806 | 867 | 5005 | GGAATCTAAATGAAGCCAGCCCTCG | Antisense | 2249 |
| 221905_at | 39 | 1049 | 5011 | TAAATGAAGCCAGCCCTCGGTATCT | Antisense | 2250 |
| 221905_at | 991 | 995 | 5027 | TCGGTATCTGCAGGTTTCTCATCCA | Antisense | 2251 |
| 221905_at | 1107 | 665 | 5100 | GATGGTTACATCCGTATTGAACATG | Antisense | 2252 |
| 221905_at | 498 | 299 | 5162 | CAAGAACTCTTTATGTAGCATTTAC | Antisense | 2253 |
| 221905_at | 800 | 745 | 5248 | GTCAGTTATATGCAAATTCTGTACC | Antisense | 2254 |
| 221905_at | 428 | 723 | 5278 | GTATCAGGGAATTGAGCATCTTCAG | Antisense | 2255 |
| 221905_at | 495 | 943 | 5290 | TGAGCATCTTCAGATGTTGGTATCT | Antisense | 2256 |
| 222462_s_at | 472 | 1021 | 3171 | TCAGAGTGGTTTCATTGCCTTCCTA | Antisense | 2257 |
| 222462_s_at | 93 | 1037 | 3203 | TAATGGCCCCTCCATTTATTTGACT | Antisense | 2258 |
| 222462_s_at | 940 | 211 | 3228 | AAAGCATCACACAGTGGCACTAGCA | Antisense | 2259 |
| 222462_s_at | 623 | 283 | 3272 | AATACAGTGCTTTATGGCTCTAACA | Antisense | 2260 |
| 222462_s_at | 879 | 987 | 3418 | TCCCCGCTCCTAATGGTACGTGGGT | Antisense | 2261 |
| 222462_s_at | 923 | 1061 | 3486 | TACCTCCCTATCAGTTCTAGCATAG | Antisense | 2262 |
| 222462_s_at | 295 | 807 | 3544 | GGGTTTTCCTAGTATACCCACTGCA | Antisense | 2263 |
| 222462_s_at | 957 | 501 | 3592 | GCTGCTTCCAGGTATGGGACCTGCT | Antisense | 2264 |
| 222462_s_at | 263 | 801 | 3607 | GGGACCTGCTAAGTGTGGAATTACC | Antisense | 2265 |
| 222462_s_at | 193 | 195 | 3651 | ACAAGGAGGGCCTCTGGTGTTCCTG | Antisense | 2266 |
| 222462_s_at | 935 | 503 | 3686 | GCTGCCCACAAGCCATAAACCAATA | Antisense | 2267 |
| 222520_s_at | 959 | 231 | 2475 | AACATGCTCACATACACAGATCTTT | Antisense | 2268 |
| 222520_s_at | 28 | 1097 | 2503 | TTTCCTTACTAGACCTCTCTTTAGT | Antisense | 2269 |
| 222520_s_at | 589 | 823 | 2697 | TGGTCTTTGGGAGGAGTCTAGTACA | Antisense | 2270 |
| 222520_s_at | 101 | 551 | 2746 | GAATTTATTTTCATGGCTGTTGTCA | Antisense | 2271 |
| 222520_s_at | 1048 | 37 | 2825 | ATCAGAACTCTCCTTAAAATGCATT | Antisense | 2272 |
| 222520_s_at | 528 | 37 | 2853 | ATCAGAAGCAAAGTACACCCATTAT | Antisense | 2273 |
| 222520_s_at | 424 | 941 | 2915 | TGAGTAGTATAAGCCACCTATTTTT | Antisense | 2274 |
| 222520_s_at | 620 | 369 | 2932 | CTATTTTTACTTCCTTCTCTGAAAT | Antisense | 2275 |
| 222520_s_at | 962 | 5 | 2957 | ATTCCAGTTAACTCAGCTTGGGTTC | Antisense | 2276 |
| 222520_s_at | 101 | 389 | 2989 | CTCCTCTCTTCCTATAGAACACTGT | Antisense | 2277 |
| 222520_s_at | 26 | 125 | 3004 | AGAACACTGTGCATACCTTGAATAA | Antisense | 2278 |
| 222654_at | 521 | 637 | 1981 | GAGACACATGATGATTTGCATTGTA | Antisense | 2279 |
| 222654_at | 1082 | 207 | 2052 | AAAGTGTGTTTGTACCCATGAGTTC | Antisense | 2280 |
| 222654_at | 370 | 161 | 2065 | ACCCATGAGTTCAGCATTTCTGCCA | Antisense | 2281 |
| 222654_at | 256 | 673 | 2118 | GATGCATGGTTGCATCCTTTTCCTT | Antisense | 2282 |
| 222654_at | 239 | 1097 | 2136 | TTTCCTTCTGACCAACACTTAGTCT | Antisense | 2283 |
| 222654_at | 74 | 625 | 2145 | GACCAACACTTAGTCTTTAACTTTG | Antisense | 2284 |
| 222654_at | 613 | 265 | 2183 | AAGGTTTCAGGGTTAGCACTATAGT | Antisense | 2285 |
| 222654_at | 652 | 369 | 2201 | CTATAGTTTTGGTTCATTTTCTCAT | Antisense | 2286 |
| 222654_at | 402 | 955 | 2302 | TGAATTGAACTGCCTTTCATTATCT | Antisense | 2287 |
| 222654_at | 50 | 727 | 2403 | GTATGGTTGCTTTTGCCATGGTTGC | Antisense | 2288 |
| 222654_at | 822 | 455 | 2418 | CCATGGTTGCTTTTACTATTAATAA | Antisense | 2289 |
| 222778_s_at | 537 | 1157 | 5611 | TTGTGAACCATTTAACCCTTTTGAT | Antisense | 2290 |
| 222778_s_at | 117 | 155 | 5683 | ACCTCTGCATCAGTTGCTTCTATAG | Antisense | 2291 |
| 222778_s_at | 107 | 517 | 5698 | GCTTCTATAGAGCATCAGCCCTCAT | Antisense | 2292 |
| 222778_s_at | 224 | 3 | 5728 | ATTGTCTTAATGTCGGGGAGCAGCC | Antisense | 2293 |
| 222778_s_at | 925 | 423 | 5764 | CCCAGGTGTCCGCATTTTTGCATGG | Antisense | 2294 |
| 222778_s_at | 830 | 861 | 5792 | GGAAAAGGCTTACTTGCCCTTCAGC | Antisense | 2295 |
| 222778_s_at | 601 | 765 | 5834 | GTGCTATTCACAGTACCATGCGAGT | Antisense | 2296 |
| 222778_s_at | 861 | 407 | 5854 | CGAGTAGCCCACAGTTAATTCCCGG | Antisense | 2297 |
| 222778_s_at | 124 | 291 | 5870 | AATTCCCGGCAGATTCTTTGGCTGT | Antisense | 2298 |
| 222778_s_at | 1035 | 1039 | 5961 | TAAGATGCTTAGGGTGCCTGGCCAG | Antisense | 2299 |
| 222778_s_at | 862 | 387 | 5988 | CTCCGTGGTTTCCTGTTGTGACAGT | Antisense | 2300 |
| 222802_at | 248 | 59 | 1555 | ATGAGTCTACCTCACCTATATTGCA | Antisense | 2301 |
| 222802_at | 157 | 539 | 1577 | GCACTCTGGCAGAAGTATTTCCCAC | Antisense | 2302 |
| 222802_at | 863 | 311 | 1599 | CACATTTAATTATTGCCTCCCCAAA | Antisense | 2303 |
| 222802_at | 607 | 423 | 1657 | CCCATACTAAATCCTAGCCTCGTAG | Antisense | 2304 |
| 222802_at | 893 | 49 | 1667 | ATCCTAGCCTCGTAGAAGTCTGGTC | Antisense | 2305 |
| 222802_at | 587 | 261 | 1682 | AAGTCTGGTCTAATGTGTCAGCAGT | Antisense | 2306 |
| 222802_at | 598 | 825 | 1724 | GGTAATCTACTAGCTCTGATCCATA | Antisense | 2307 |
| 222802_at | 1012 | 39 | 1768 | ATCAGGAGATTCCCTGTCCTTGATT | Antisense | 2308 |
| 222802_at | 309 | 1097 | 1874 | TTTTCCTTTATATAACCGGCTAATG | Antisense | 2309 |
| 222802_at | 1113 | 913 | 1994 | TGGGCAGGCCATATTGGTCTATGTA | Antisense | 2310 |
| 222802_at | 858 | 181 | 2053 | ACATGCTTTGTTTTGCCTGTCAAGG | Antisense | 2311 |
| 222858_s_at | 88 | 415 | 969 | CGATCTCGGTCGTTCATCTTTAAAT | Antisense | 2312 |
| 222858_s_at | 47 | 469 | 1005 | GCCAAGGAATGCTCTGGCCCAGGAG | Antisense | 2313 |
| 222858_s_at | 88 | 619 | 1049 | GACGCTGTGATCTGCAGCAGGCTTC | Antisense | 2314 |
| 222858_s_at | 1127 | 453 | 1136 | CCATATACCACGTTGCTGACTCACG | Antisense | 2315 |
| 222858_s_at | 193 | 1123 | 1231 | TTAAACCACCACTCTTAGGTCTGCT | Antisense | 2316 |
| 222858_s_at | 793 | 1073 | 1246 | TAGGTCTGCTCACTCTTAGAACACA | Antisense | 2317 |
| 222858_s_at | 720 | 1155 | 1291 | TTGTTTTCACTCATTGTGGTCCCCA | Antisense | 2318 |
| 222858_s_at | 57 | 601 | 1324 | GACACTAGTTGCCTAGAGTCCCACT | Antisense | 2319 |
| 222858_s_at | 251 | 757 | 1341 | GTCCCACTGTGAGTCATGGTCAGCC | Antisense | 2320 |
| 222858_s_at | 292 | 907 | 1357 | TGGTCAGCCTGTCTGACATCCAGGT | Antisense | 2321 |
| 222858_s_at | 506 | 843 | 1414 | GGAGGCTTAGATGACTTCTGCAGGA | Antisense | 2322 |
| 222859_s_at | 695 | 1115 | 1837 | TTATCTTTATCCAACATTTCTCCAA | Antisense | 2323 |
| 222859_s_at | 824 | 777 | 1890 | GTGTATTATAACAATCCCTTTCCCA | Antisense | 2324 |
| 222859_s_at | 454 | 197 | 1900 | ACAATCCCTTTCCCAGAATTAGTTG | Antisense | 2325 |
| 222859_s_at | 995 | 547 | 1915 | GAATTAGTTGTATAGGGTTGGCCCA | Antisense | 2326 |
| 222859_s_at | 1135 | 123 | 1949 | AGAAAAATCTCGCATTGCTCCCTAA | Antisense | 2327 |
| 222859_s_at | 105 | 541 | 1996 | GCAACTTCTATTTCCAGTCGGGGGA | Antisense | 2328 |
| 222859_s_at | 812 | 773 | 2067 | GTGTTCCAAAGCTTTTTCAAACTAG | Antisense | 2329 |
| 222859_s_at | 125 | 645 | 2115 | GAGATACTGATGTCCACAGTTCATT | Antisense | 2330 |
| 222859_s_at | 959 | 703 | 2133 | GTTCATTGGCAGAATCTAACCCCTT | Antisense | 2331 |
| 222859_s_at | 747 | 507 | 2269 | GCTCTTGCAGTCCAAAGGGATACCT | Antisense | 2332 |
| 222859_s_at | 662 | 231 | 2316 | AACATCTCAGACGCAAAAATTACAT | Antisense | 2333 |
| 223095_at | 224 | 971 | 2789 | TGCCTGTAGCATTCCAGAGCTCACT | Antisense | 2334 |
| 223095_at | 330 | 377 | 2858 | CTCACTCTGTCTGCCAGGTATGAGA | Antisense | 2335 |
| 223095_at | 223 | 127 | 2880 | AGAAGAACACGTAAGACCGCCACCA | Antisense | 2336 |
| 223095_at | 975 | 391 | 2952 | CTGCCCCCAGAACTTTTGGATACTG | Antisense | 2337 |
| 223095_at | 448 | 843 | 2976 | GGAGGCAGTTGCATAGGTCTCCCTC | Antisense | 2338 |
| 223095_at | 239 | 489 | 3024 | GCCCAAGACTACTCTGGGCAGCTCC | Antisense | 2339 |
| 223095_at | 148 | 861 | 3079 | GGAAAGGATTTCTACAGTGTTCTAT | Antisense | 2340 |
| 223095_at | 417 | 115 | 3114 | AGAGAGAGTGGGTTTGGGAAGAGTG | Antisense | 2341 |
| 223095_at | 141 | 697 | 3145 | GTTGGGGAGAGGGGACCGATGTGCC | Antisense | 2342 |
| 223095_at | 136 | 621 | 3158 | GACCGATGTGCCTCATTGTTTAGTG | Antisense | 2343 |
| 223095_at | 581 | 1139 | 3201 | TTCTGGATAAAGTTTGGTTGTTTGC | Antisense | 2344 |
| 223198_x_at | 801 | 573 | 449 | GAAGCCTGACACCTTCAGGGACCAG | Antisense | 2345 |
| 223198_x_at | 666 | 623 | 468 | GACCAGCTCCAGGAGCTCTGCATCC | Antisense | 2346 |
| 223198_x_at | 23 | 1155 | 550 | TTGATTCTGTGGCCCAGCAGCAGGG | Antisense | 2347 |
| 223198_x_at | 801 | 391 | 582 | CTGCCGCATGTTGCTGACTTTCGGT | Antisense | 2348 |
| 223198_x_at | 998 | 627 | 659 | GAGCGTCCTGATGCAGCTGAAGCTT | Antisense | 2349 |
| 223198_x_at | 862 | 911 | 689 | TGGGTCAGCATACCGCTTTGAGGTC | Antisense | 2350 |
| 223198_x_at | 313 | 469 | 720 | GCCAAGTTCCAGGAGCTGCGGTACA | Antisense | 2351 |
| 223198_x_at | 1158 | 1027 | 817 | TCACTTGACCAGTCCCATTCAGATC | Antisense | 2352 |
| 223198_x_at | 1125 | 821 | 865 | GGTGCCAAAGTGCAGCTGACTCTTC | Antisense | 2353 |
| 223198_x_at | 639 | 1141 | 907 | TTCCCATGAGGCAGGCTCTTCAGTG | Antisense | 2354 |
| 223198_x_at | 985 | 629 | 977 | GAGCTATGCCTTTTTTTCTTTTTGG | Antisense | 2355 |
| 223284_at | 959 | 109 | 860 | AGAGGCCTGCCGAGGGGAGGAGCCT | Antisense | 2356 |
| 223284_at | 323 | 761 | 892 | GTCCACCCGTCAGCAGTGTGAAGTC | Antisense | 2357 |
| 223284_at | 530 | 261 | 912 | AAGTCTGTTGTGTTTGAGCTTCTCA | Antisense | 2358 |
| 223284_at | 624 | 375 | 933 | CTCAGAGTGGAATGACTCCTTTTCC | Antisense | 2359 |
| 223284_at | 503 | 429 | 1036 | CCCGGGTGATGTCTGCAAAGTCTGT | Antisense | 2360 |
| 223284_at | 334 | 923 | 1045 | TGTCTGCAAAGTCTGTGCTGTCCGT | Antisense | 2361 |
| 223284_at | 346 | 497 | 1077 | GCTGGGAGAGCTATCTGGGGAGGGG | Antisense | 2362 |
| 223284_at | 616 | 411 | 1112 | CGAGCAGAATACACCCCAGAGTTAG | Antisense | 2363 |
| 223284_at | 994 | 325 | 1128 | CAGAGTTAGGGTTTGCGACTCCGCC | Antisense | 2364 |
| 223284_at | 116 | 1153 | 1202 | TTGACTGCTTAGGAGGCGCGACGCA | Antisense | 2365 |
| 223284_at | 1161 | 403 | 1252 | CTGGGAAGGTTGAGAGCTGAGACGG | Antisense | 2366 |
| 223407_at | 512 | 933 | 1041 | TGTTGGAGCGCAGGGACCTGTGGCG | Antisense | 2367 |
| 223407_at | 533 | 243 | 1139 | AACCAGCGGCTGGAAACACTGACCA | Antisense | 2368 |
| 223407_at | 909 | 899 | 1149 | TGGAAACACTGACCAAGCTGCTCCA | Antisense | 2369 |
| 223407_at | 538 | 625 | 1180 | GAGCCAGCTGCTGCGTGAGCTGGTA | Antisense | 2370 |
| 223407_at | 387 | 393 | 1212 | CTGCTGGGGCAGACTCACTGAGAGC | Antisense | 2371 |
| 223407_at | 478 | 473 | 1286 | GCCATCAAGATCTTTTCTCGGCCCA | Antisense | 2372 |
| 223407_at | 35 | 1141 | 1316 | TTCGTGAAGATGGACGACTGAGCCC | Antisense | 2373 |
| 223407_at | 647 | 545 | 1356 | GCAAGGAGCTCCATGCTGAGGATCG | Antisense | 2374 |
| 223407_at | 1123 | 53 | 1368 | ATGCTGAGGATCGCCACATGGCTGC | Antisense | 2375 |
| 223407_at | 734 | 839 | 1375 | GGATCGCCACATGGCTGCAAAGGAC | Antisense | 2376 |
| 223407_at | 354 | 855 | 1406 | GGACCCAATCCCAGAGCAGAGGTCT | Antisense | 2377 |
| 223571_at | 616 | 305 | 999 | CAAAGTCATCTGAACTTCCGTTTCC | Antisense | 2378 |
| 223571_at | 849 | 1077 | 1124 | TATCAAGGTGCTAAGGCCCGGGTGG | Antisense | 2379 |
| 223571_at | 639 | 821 | 1182 | GGTGCTGCCTTTACAAACACCTGCA | Antisense | 2380 |
| 223571_at | 376 | 457 | 1227 | CCAGGCTTTAGAGCCCTCAGCAGGT | Antisense | 2381 |
| 223571_at | 168 | 427 | 1240 | CCCTCAGCAGGTCTGGGGAGCTAGA | Antisense | 2382 |
| 223571_at | 1133 | 303 | 1266 | CAAAGGAGGGACCTCAGGCCTTCCG | Antisense | 2383 |
| 223571_at | 713 | 451 | 1353 | CCTTCTCCCCAGAGGGAGGCGGCCT | Antisense | 2384 |
| 223571_at | 546 | 453 | 1382 | CCATTGGTGCTCATGCAGACTCTGG | Antisense | 2385 |
| 223571_at | 607 | 483 | 1445 | GCCGAGGGAGCCGTGGCTCCATGGC | Antisense | 2386 |
| 223571_at | 987 | 881 | 1459 | GGCTCCATGGCCAGATGACGGAAAC | Antisense | 2387 |
| 223571_at | 339 | 253 | 1505 | AAGACCTGTGCTATAAACCACCCTG | Antisense | 2388 |
| 223645_s_at | 600 | 1101 | 717 | TTTAGCAGTGCCTGTGACGCATTCC | Antisense | 2389 |
| 223645_s_at | 547 | 499 | 745 | GCTGACCTGGATTCTTCCAATATGC | Antisense | 2390 |
| 223645_s_at | 1002 | 189 | 773 | ACACTTCCTCTAAAAGAGCCCCAGG | Antisense | 2391 |
| 223645_s_at | 871 | 339 | 794 | CAGGAGTCCATCTGGAGGCTGACCC | Antisense | 2392 |
| 223645_s_at | 252 | 225 | 837 | AAAATGCTACTCAAAAGCCCTCTCC | Antisense | 2393 |
| 223645_s_at | 324 | 311 | 861 | CACAGGATCTCCTCTAGGCATTGAT | Antisense | 2394 |
| 223645_s_at | 130 | 125 | 1009 | AGAACTACTCAACTGTGTGGTAACA | Antisense | 2395 |
| 223645_s_at | 731 | 1061 | 1044 | TACCAATTTCCCCAACTATGTTGCA | Antisense | 2396 |
| 223645_s_at | 929 | 555 | 1096 | GAATGCATGTTTTCATTGCCTTCTC | Antisense | 2397 |
| 223645_s_at | 747 | 733 | 1131 | GTACGTTTGTGTGTTCATCACCTTA | Antisense | 2398 |
| 223645_s_at | 41 | 385 | 1220 | CTCTGGAGCCCATAATATCTACATA | Antisense | 2399 |
| 223646_s_at | 435 | 225 | 1999 | AAAATACTGGACCCACTTCTTTCAG | Antisense | 2400 |
| 223646_s_at | 476 | 565 | 2031 | GAAGATACCTTATATGCCCTAAAGT | Antisense | 2401 |
| 223646_s_at | 1055 | 485 | 2046 | GCCCTAAAGTTAATACCAGCAGTCA | Antisense | 2402 |
| 223646_s_at | 612 | 885 | 2131 | GGCTGTGACACTTCTTTGTGGTACT | Antisense | 2403 |
| 223646_s_at | 526 | 159 | 2363 | ACCCTTTGCAGAAGATTCCCTTGTA | Antisense | 2404 |
| 223646_s_at | 989 | 1139 | 2378 | TTCCCTTGTAAATGGCCCTGTGGCA | Antisense | 2405 |
| 223646_s_at | 534 | 877 | 2399 | GGCATGCCCAGTATCTGCAATGTTC | Antisense | 2406 |
| 223646_s_at | 253 | 871 | 2437 | GGCAAACCTCTCTGTTTGCCAAGCC | Antisense | 2407 |
| 223646_s_at | 175 | 717 | 2450 | GTTTGCCAAGCCTGCAGAGTTGAAC | Antisense | 2408 |
| 223646_s_at | 979 | 1049 | 2490 | TACAATCTGACCCTGTTTTTTGGCC | Antisense | 2409 |
| 223646_s_at | 176 | 429 | 2513 | CCCTGTTTCTGGACACTGTAGCTGA | Antisense | 2410 |
| 224588_at | 789 | 409 | 4992 | CGGAACTACATGCCCTAGGATATAA | Antisense | 2411 |
| 224588_at | 396 | 97 | 5173 | AGTCCTGTCCAGAAGATACATGCTT | Antisense | 2412 |
| 224588_at | 920 | 345 | 5191 | CATGCTTCCTGGCCTGATTGAGGAG | Antisense | 2413 |
| 224588_at | 310 | 197 | 5236 | ACAAGGTGTTGTGGTCTTCCATCCA | Antisense | 2414 |
| 224588_at | 979 | 977 | 5253 | TCCATCCAGTTTCTTAAGTGCTGAT | Antisense | 2415 |
| 224588_at | 1159 | 319 | 5297 | CACCTTGACCTGGCCTACAGAAGTA | Antisense | 2416 |
| 224588_at | 863 | 971 | 5338 | TGCCTCAGGCGTGCTTTTTGATTCA | Antisense | 2417 |
| 224588_at | 277 | 551 | 5390 | GAATATACCATTCTGGGTCCTGAGG | Antisense | 2418 |
| 224588_at | 46 | 655 | 5426 | GAGGGCATTAGATCACTGACAGCTG | Antisense | 2419 |
| 224588_at | 787 | 17 | 5490 | ATTTCAATGCCTATTCTCTGCAAGG | Antisense | 2420 |
| 224588_at | 89 | 1137 | 5503 | TTCTCTGCAAGGTACTATGTTTCGT | Antisense | 2421 |
| 224590_at | 229 | 1119 | 6809 | TTACAAGGTTTGTCTATTTTCAGTT | Antisense | 2422 |
| 224590_at | 45 | 105 | 6830 | AGTTCTTTACTTTTTACATGCTGAC | Antisense | 2423 |
| 224590_at | 76 | 315 | 6865 | CACTGCCTAAATAGATCTCTTTCAG | Antisense | 2424 |
| 224590_at | 720 | 293 | 6893 | CAATCCTCAGATAACGCATAGCAAA | Antisense | 2425 |
| 224590_at | 1144 | 687 | 6934 | GATTTCTCATGCAACAGCTTCTCTA | Antisense | 2426 |
| 224590_at | 834 | 325 | 6948 | CAGCTTCTCTAATTATACCTTAGAA | Antisense | 2427 |
| 224590_at | 988 | 1083 | 6961 | TATACCTTAGAAATGTTCTCCTTTT | Antisense | 2428 |
| 224590_at | 624 | 1107 | 6982 | TTTTTATCATCAAATCTGCTCAAGA | Antisense | 2429 |
| 224590_at | 1159 | 949 | 7039 | TGAAAACAGCTTAACATTTTACCAT | Antisense | 2430 |
| 224590_at | 306 | 15 | 7134 | ATTTCTCTAAATGTAGGCCTGGCTG | Antisense | 2431 |
| 224590_at | 930 | 373 | 7140 | CTAAATGTAGGCCTGGCTGGGCTTT | Antisense | 2432 |
| 224709_s_at | 1130 | 1031 | 3018 | TCAAGAGGTCATTTGTTCCCCATAG | Antisense | 2433 |
| 224709_s_at | 355 | 1143 | 3033 | TTCCCCATAGCAGCATATCTCATTT | Antisense | 2434 |
| 224709_s_at | 1122 | 1101 | 3084 | TTTACTACTCAACATTCATTATACT | Antisense | 2435 |
| 224709_s_at | 912 | 609 | 3161 | GACTTAGTCATGTGGATTGTTAGCA | Antisense | 2436 |
| 224709_s_at | 931 | 709 | 3179 | GTTAGCAGTGATCTGCATTCTGTAA | Antisense | 2437 |
| 224709_s_at | 819 | 657 | 3206 | GAGGTACTTTCCCATGATGTAGGCA | Antisense | 2438 |
| 224709_s_at | 593 | 91 | 3234 | AGTGGTGCCAGTAAGCGTAGAGCGG | Antisense | 2439 |
| 224709_s_at | 233 | 807 | 3282 | GGGTTTAGCATTTCCAGTGCAGCAT | Antisense | 2440 |
| 224709_s_at | 971 | 93 | 3297 | AGTGCAGCATTATCAGTGGGCCTTT | Antisense | 2441 |
| 224709_s_at | 238 | 1045 | 3410 | TAAAATGACTTCTGCTAAGCACCCA | Antisense | 2442 |
| 224709_s_at | 742 | 703 | 3510 | GTTCTGTGTTGGCTTGTAGATACTA | Antisense | 2443 |
| 224859_at | 928 | 535 | 1986 | GCACCCTGCGGTTTGCAGGGGGCTC | Antisense | 2444 |
| 224859_at | 1071 | 317 | 2077 | CACCCATAATTCTTACCCAGAGCAT | Antisense | 2445 |
| 224859_at | 313 | 525 | 2098 | GCATGGGGTTGGGGCGGAAACCTGG | Antisense | 2446 |
| 224859_at | 659 | 427 | 2138 | CCCTCGCCACGGCTAGAGAATCTGG | Antisense | 2447 |
| 224859_at | 389 | 909 | 2160 | TGGTGGTGTCCAAAATGTCTGTCCA | Antisense | 2448 |
| 224859_at | 335 | 427 | 2213 | CCCTCTGGACCTTTCATAGCAGCAG | Antisense | 2449 |
| 224859_at | 711 | 47 | 2272 | ATGCTTTGGGGACACCGAGGGGACT | Antisense | 2450 |
| 224859_at | 929 | 461 | 2309 | CCACCATGGTGCTATTCTGGGGCTG | Antisense | 2451 |
| 224859_at | 700 | 505 | 2365 | GCTCCTGGCCTCTGGTAGAGTGAGA | Antisense | 2452 |
| 224859_at | 685 | 609 | 2388 | GACTTCAGACGTTCTGATGCCTTCC | Antisense | 2453 |
| 224859_at | 707 | 1137 | 2399 | TTCTGATGCCTTCCGGATGTCATCT | Antisense | 2454 |
| 224940_s_at | 384 | 283 | 3317 | AATAAAACTGTGATCTCGTCTAGAG | Antisense | 2455 |
| 224940_s_at | 161 | 239 | 3322 | AACTGTGATCTCGTCTAGAGAAAAT | Antisense | 2456 |
| 224940_s_at | 675 | 1131 | 3350 | TTCATATTACAAACTGCTCTTCCAT | Antisense | 2457 |
| 224940_s_at | 287 | 1051 | 3357 | TACAAACTGCTCTTCCATATTTATG | Antisense | 2458 |
| 224940_s_at | 343 | 1105 | 3376 | TTTATGTACCATATTATACCTTTTT | Antisense | 2459 |
| 224940_s_at | 383 | 667 | 3440 | GATGTTGAAACCTGTTTGGCACCTT | Antisense | 2460 |
| 224940_s_at | 713 | 931 | 3442 | TGTTGAAACCTGTTTGGCACCTTCT | Antisense | 2461 |
| 224940_s_at | 665 | 719 | 3453 | GTTTGGCACCTTCTGGAAGCTACCA | Antisense | 2462 |
| 224940_s_at | 368 | 871 | 3457 | GGCACCTTCTGGAAGCTACCAAAAA | Antisense | 2463 |
| 224940_s_at | 293 | 225 | 3480 | AAAATGACACTCCATTGAAGTGCTT | Antisense | 2464 |
| 224940_s_at | 518 | 601 | 3485 | GACACTCCATTGAAGTGCTTAAAAG | Antisense | 2465 |
| 224941_at | 376 | 751 | 2955 | GTCTACTTAAGACTTCTGGTCATTT | Antisense | 2466 |
| 224941_at | 793 | 607 | 2965 | GACTTCTGGTCATTTCCAACTTATA | Antisense | 2467 |
| 224941_at | 210 | 975 | 3050 | TCCACATCAAGTGTTCCATTAAAAG | Antisense | 2468 |
| 224941_at | 61 | 257 | 3075 | AAGATAAGGCATTCTGAGTGCAAAC | Antisense | 2469 |
| 224941_at | 299 | 651 | 3090 | GAGTGCAAACAAATGGGGGCTTCTT | Antisense | 2470 |
| 224941_at | 1066 | 813 | 3105 | GGGGCTTCTTAAACTACACACCAGC | Antisense | 2471 |
| 224941_at | 178 | 235 | 3116 | AACTACACACCAGCAGTCAGTGAGG | Antisense | 2472 |
| 224941_at | 1093 | 287 | 3153 | AATTATTGAGTTGCTTTCTTGGGTC | Antisense | 2473 |
| 224941_at | 1027 | 645 | 3160 | GAGTTGCTTTCTTGGGTCTCTATAA | Antisense | 2474 |
| 224941_at | 1020 | 367 | 3179 | CTATAATCAATAACCTGTCTGCAGA | Antisense | 2475 |
| 224941_at | 178 | 1043 | 3189 | TAACCTGTCTGCAGATATCTATCTA | Antisense | 2476 |
| 225150_s_at | 1144 | 771 | 2283 | GTGAGAGAGAAAGGTGCTGGCATAG | Antisense | 2477 |
| 225150_s_at | 486 | 821 | 2295 | GGTGCTGGCATAGGATCTGCCCAGA | Antisense | 2478 |
| 225150_s_at | 1027 | 495 | 2298 | GCTGGCATAGGATCTGCCCAGAAGA | Antisense | 2479 |
| 225150_s_at | 657 | 567 | 2318 | GAAGAGAAAATGACCCATGCGCAGT | Antisense | 2480 |
| 225150_s_at | 687 | 57 | 2327 | ATGACCCATGCGCAGTTGGGCTCTG | Antisense | 2481 |
| 225150_s_at | 759 | 895 | 2335 | TGCGCAGTTGGGCTCTGGATACGGC | Antisense | 2482 |
| 225150_s_at | 603 | 997 | 2348 | TCTGGATACGGCGCTGTCTATAGCA | Antisense | 2483 |
| 225150_s_at | 417 | 887 | 2357 | GGCGCTGTCTATAGCAAGTTGGCCA | Antisense | 2484 |
| 225150_s_at | 211 | 369 | 2365 | CTATAGCAAGTTGGCCAGTCTGGCC | Antisense | 2485 |
| 225150_s_at | 480 | 425 | 2439 | CCCTCTTAAATTGTGGTTGCCATGG | Antisense | 2486 |
| 225150_s_at | 1018 | 1 | 2448 | ATTGTGGTTGCCATGGTACCGAGGG | Antisense | 2487 |
| 225230_at | 505 | 615 | 1075 | GACTGTTGTTGGTTATCTGGTGTGG | Antisense | 2488 |
| 225230_at | 399 | 767 | 1105 | GTGCACTTAGCATGCTGACTTGCTC | Antisense | 2489 |
| 225230_at | 286 | 609 | 1121 | GACTTGCTCATCAGTTTTGCACAGT | Antisense | 2490 |
| 225230_at | 610 | 389 | 1176 | CTCCATTGGAACCCCGAGGACAAAG | Antisense | 2491 |
| 225230_at | 924 | 361 | 1209 | CTTCACATGATCACTACTGCAGCAG | Antisense | 2492 |
| 225230_at | 346 | 169 | 1224 | ACTGCAGCAGAATGGTCTATGTCAT | Antisense | 2493 |
| 225230_at | 629 | 713 | 1261 | GTTTTTTCCTGACTTACATTCGTGA | Antisense | 2494 |
| 225230_at | 317 | 395 | 1345 | CTGCACCTTGCCCTATTAACAATGA | Antisense | 2495 |
| 225230_at | 830 | 949 | 1367 | TGAACGAACACGGCTACTTTCCAGA | Antisense | 2496 |
| 225230_at | 451 | 1127 | 1487 | TTCAACCACTTAATCAAGGCTGACA | Antisense | 2497 |
| 225230_at | 397 | 229 | 1601 | AACACCTATGCCTATACTTTTTTAT | Antisense | 2498 |
| 225475_at | 433 | 253 | 3904 | AAGACATTCCACTATTATGCGTAAT | Antisense | 2499 |
| 225475_at | 705 | 1079 | 3919 | TATGCGTAATGCTCAGCTTTTTGTA | Antisense | 2500 |
| 225475_at | 222 | 287 | 3992 | AATTTGTTCTTAATGCAGCCACTAT | Antisense | 2501 |
| 225475_at | 799 | 275 | 4003 | AATGCAGCCACTATAACTTGATAAG | Antisense | 2502 |
| 225475_at | 610 | 233 | 4017 | AACTTGATAAGTCATTGCACTATTT | Antisense | 2503 |
| 225475_at | 208 | 319 | 4172 | CACCCCCAACAAAGCACTATCATTT | Antisense | 2504 |
| 225475_at | 652 | 807 | 4208 | GGGTATTTTCTGTTTCATGATGTAT | Antisense | 2505 |
| 225475_at | 73 | 647 | 4242 | GAGTTCAGGATCTGCAATTCAGTTC | Antisense | 2506 |
| 225475_at | 914 | 547 | 4255 | GCAATTCAGTTCAACACAAGTTTGT | Antisense | 2507 |
| 225475_at | 838 | 925 | 4368 | TGTAAAATAATTCCCTTCTCCCATT | Antisense | 2508 |
| 225475_at | 819 | 1145 | 4391 | TTCCTTGTCTGCCATTCTGAATATG | Antisense | 2509 |
| 225531_at | 235 | 331 | 3557 | CAGAGATCTGTGGGGAAGCTCCGCC | Antisense | 2510 |
| 225531_at | 933 | 461 | 3581 | CCAGCCACACTCCTTGGGATAATAC | Antisense | 2511 |
| 225531_at | 987 | 35 | 3599 | ATAATACTAGCCGGTTCTGCCTGAT | Antisense | 2512 |
| 225531_at | 363 | 171 | 3659 | ACTCCTCTAGTGAGCCTTGACTGTT | Antisense | 2513 |
| 225531_at | 883 | 299 | 3705 | CAAGCCAAGAGGTTGCTGCAGCTGC | Antisense | 2514 |
| 225531_at | 955 | 471 | 3803 | GCCAGCCCAATGACACCTTGAAGTC | Antisense | 2515 |
| 225531_at | 757 | 1099 | 3839 | TTTCTTGCCCGCTAATAAAACCTAT | Antisense | 2516 |
| 225531_at | 201 | 979 | 3905 | TCCTTGGCATTTTGTTGTTCCGATC | Antisense | 2517 |
| 225531_at | 661 | 1153 | 3919 | TTGTTCCGATCACAGATTTCCCTGC | Antisense | 2518 |
| 225531_at | 15 | 811 | 3946 | GGGTGTCTGTGGTTATCAGCTGCAG | Antisense | 2519 |
| 225531_at | 492 | 163 | 4013 | ACGTGCCCTACCTTAGTGACGGGAG | Antisense | 2520 |
| 225736_at | 96 | 445 | 675 | CCTCTGGATATTGATGCCTCGGGTG | Antisense | 2521 |
| 225736_at | 1112 | 899 | 719 | TGGACACCGAATCCAGAGTGCCACT | Antisense | 2522 |
| 225736_at | 478 | 315 | 740 | CACTGTGCTCCTCAACGAGGACGTC | Antisense | 2523 |
| 225736_at | 837 | 671 | 768 | GATGAGAAGACTGCTGAGGCTGCGA | Antisense | 2524 |
| 225736_at | 83 | 939 | 782 | TGAGGCTGCGATGCAGCGCCTCAAA | Antisense | 2525 |
| 225736_at | 743 | 211 | 804 | AAAGCGGCCAACATTCCAGAGCATA | Antisense | 2526 |
| 225736_at | 596 | 631 | 822 | GAGCATAACACCATTGGCTTCATGT | Antisense | 2527 |
| 225736_at | 659 | 879 | 837 | GGCTTCATGTTTGCATGCGTTGGCA | Antisense | 2528 |
| 225736_at | 157 | 695 | 855 | GTTGGCAGGGGCTTTCAGTATTACA | Antisense | 2529 |
| 225736_at | 584 | 987 | 932 | TCCCTTATTCGGCTTCTTTGGAAAT | Antisense | 2530 |
| 225736_at | 225 | 71 | 1056 | ATGGCACTCATACATCTGGGGTCAT | Antisense | 2531 |
| 225882_at | 1108 | 535 | 2178 | GCACCTTACATATTTGATGCTCAGG | Antisense | 2532 |
| 225882_at | 944 | 461 | 2283 | CCACCCTTACATCTCCATAGTTGGT | Antisense | 2533 |
| 225882_at | 1067 | 695 | 2302 | GTTGGTACAGTTAGCTTGTAGCAGC | Antisense | 2534 |
| 225882_at | 561 | 51 | 2335 | ATGCCTGGAGATCACTGTCTGTTGG | Antisense | 2535 |
| 225882_at | 429 | 401 | 2349 | CTGTCTGTTGGTCTGATCTCAGTAT | Antisense | 2536 |
| 225882_at | 844 | 333 | 2368 | CAGTATCATACTGAGACACCTCCCC | Antisense | 2537 |
| 225882_at | 909 | 441 | 2391 | CCTGAGCCTTACCTACTTAAATTGG | Antisense | 2538 |
| 225882_at | 899 | 661 | 2453 | GAGGCAAGTTGCAAGGGAGCCAGAG | Antisense | 2539 |
| 225882_at | 841 | 285 | 2534 | AATTTCTTTGGCACATTGACTTACT | Antisense | 2540 |
| 225882_at | 169 | 873 | 2543 | GGCACATTGACTTACTGATATCTTT | Antisense | 2541 |
| 225882_at | 408 | 1001 | 2614 | TATTCCCCGGCGCAATAAAAATGCC | Antisense | 2542 |
| 226042_at | 697 | 1141 | 1640 | TTCCCTTCAGTCTTAAATTGTCTCC | Antisense | 2543 |
| 226042_at | 742 | 925 | 1688 | TGTAACCCTTGTGCTGTGTATTCTC | Antisense | 2544 |
| 226042_at | 853 | 1001 | 1719 | TCTGCTCACTCTCAGGGCCAAGCAG | Antisense | 2545 |
| 226042_at | 324 | 889 | 1756 | GGCCCTCTCTTGGCCAAAATCTGAG | Antisense | 2546 |
| 226042_at | 636 | 1161 | 1804 | TTGGTAGGTAGGTTCTGGCTGCCTG | Antisense | 2547 |
| 226042_at | 1006 | 919 | 1897 | TGTCCACTCCAGCAAGATCCAGGGA | Antisense | 2548 |
| 226042_at | 250 | 803 | 1918 | GGGATGATAGCCTTGCAGGGCCACT | Antisense | 2549 |
| 226042_at | 85 | 913 | 1942 | TGGGAGTTTGTGCCCAAGCTTCTCC | Antisense | 2550 |
| 226042_at | 345 | 565 | 2045 | GAAGTATGATTCCTCTGTCTTCAGT | Antisense | 2551 |
| 226042_at | 456 | 1021 | 2075 | TCAGGGGCATCCTGCCCATAGTACC | Antisense | 2552 |
| 226042_at | 1123 | 951 | 2129 | TGAAGCCTAGCACTCATGCAGCTCT | Antisense | 2553 |
| 226043_at | 966 | 89 | 2223 | AGTGGGGGGGTGGTCAGTGGAAGCT | Antisense | 2554 |
| 226043_at | 952 | 141 | 2244 | AGCTGGGGAGGCTTCACTCAGCTCA | Antisense | 2555 |
| 226043_at | 871 | 1027 | 2327 | TCACTGCTCTCTCCATGGGGAGGGG | Antisense | 2556 |
| 226043_at | 609 | 337 | 2357 | CAGGGCACCAAGTTCGGGATCCTAG | Antisense | 2557 |
| 226043_at | 79 | 435 | 2542 | CCCCACTCTCAGGCTAGGATGGAGA | Antisense | 2558 |
| 226043_at | 710 | 431 | 2667 | CCCCCCCGCATACTTGAATGTATGT | Antisense | 2559 |
| 226043_at | 11 | 727 | 2686 | GTATGTGCGTATTTATTGCTCACGT | Antisense | 2560 |
| 226043_at | 432 | 17 | 2696 | ATTTATTGCTCACGTCTGTGCCATG | Antisense | 2561 |
| 226043_at | 664 | 1027 | 2705 | TCACGTCTGTGCCATGTTGTCAATG | Antisense | 2562 |
| 226043_at | 534 | 931 | 2719 | TGTTGTCAATGGGTCCTTTCCAACC | Antisense | 2563 |
| 226043_at | 589 | 365 | 2734 | CTTTCCAACCCAAGAGGTACATTTG | Antisense | 2564 |
| 226118_at | 66 | 79 | 2108 | AGGAGACGGACCTGTGAGTCTGACC | Antisense | 2565 |
| 226118_at | 853 | 711 | 2180 | GTTTTGTCAGGTTGTCCTTGTTTGG | Antisense | 2566 |
| 226118_at | 459 | 451 | 2195 | CCTTGTTTGGATCCCTCAACTAGGT | Antisense | 2567 |
| 226118_at | 604 | 901 | 2249 | TGGACGTGTTTCTTTAACCTCATCC | Antisense | 2568 |
| 226118_at | 800 | 151 | 2330 | ACCAGAGCTTGGGACCAGGGCTCCT | Antisense | 2569 |
| 226118_at | 1000 | 287 | 2361 | AATTTTCTCTCCTGGTAGCTGAACA | Antisense | 2570 |
| 226118_at | 495 | 581 | 2410 | GAACAGGCTGCCGTCAGCCAGAGTT | Antisense | 2571 |
| 226118_at | 284 | 717 | 2453 | GTTTCCCTTGTTGACAATTGCTCTC | Antisense | 2572 |
| 226118_at | 1034 | 5 | 2469 | ATTGCTCTCCAGTTCCTATGAAAGC | Antisense | 2573 |
| 226118_at | 72 | 583 | 2520 | GAACACAACCATCTTAGGCCTGAGC | Antisense | 2574 |
| 226118_at | 662 | 1001 | 2581 | TCTGCTTGCCGAACTTTCTCAATAA | Antisense | 2575 |
| 226152_at | 97 | 829 | 533 | GGTAGTTTCTGAACCTATTGACATT | Antisense | 2576 |
| 226152_at | 41 | 839 | 567 | GGATCATGTGCCATATTTTGTTAGT | Antisense | 2577 |
| 226152_at | 194 | 245 | 759 | AACCAAATGTGAACTTCCTGTCTCC | Antisense | 2578 |
| 226152_at | 1009 | 445 | 786 | CCTCAGCACTAGTCCATGCCAGGAC | Antisense | 2579 |
| 226152_at | 1122 | 345 | 800 | CATGCCAGGACACCAGCTGACAATT | Antisense | 2580 |
| 226152_at | 412 | 499 | 815 | GCTGACAATTTCTTGGTTTTACTGT | Antisense | 2581 |
| 226152_at | 264 | 681 | 857 | GATCAATTACTGTCCTCACTTAGAA | Antisense | 2582 |
| 226152_at | 152 | 583 | 879 | GAACAAAGCCTGAGTCCGAGAATAT | Antisense | 2583 |
| 226152_at | 173 | 17 | 908 | ATTTTACCAATATATGCCTGTTACA | Antisense | 2584 |
| 226152_at | 241 | 285 | 1027 | AATATTTACCGACATTCCTTATACA | Antisense | 2585 |
| 226152_at | 855 | 947 | 1052 | TGACAGACACTTGGCTACATGGGAA | Antisense | 2586 |
| 226207_at | 234 | 461 | 1025 | CCAGCCGGAGTCGGGCATCAAGCGA | Antisense | 2587 |
| 226207_at | 931 | 711 | 1052 | GTTTAGCTTCTTCTCCCGAGATAAG | Antisense | 2588 |
| 226207_at | 628 | 989 | 1065 | TCCCGAGATAAGAAGCGCCTGGCCA | Antisense | 2589 |
| 226207_at | 319 | 435 | 1145 | CCGCGATGACGGTTACACAGAGCAA | Antisense | 2590 |
| 226207_at | 627 | 1031 | 1280 | TCAAGCCTCTCGGTGCAGATGCACC | Antisense | 2591 |
| 226207_at | 388 | 331 | 1295 | CAGATGCACCCTGAAAACTGACCCC | Antisense | 2592 |
| 226207_at | 924 | 215 | 1309 | AAACTGACCCCTCAAACAGACTGTC | Antisense | 2593 |
| 226207_at | 1150 | 1059 | 1391 | TACCCAGGGCTATCACTGTTTCTAA | Antisense | 2594 |
| 226207_at | 952 | 1067 | 1416 | TAGATGACTCTGATCCCGTAGGATA | Antisense | 2595 |
| 226207_at | 1154 | 663 | 1464 | GAGGCCAGACTTCTGCGTTAACTTC | Antisense | 2596 |
| 226207_at | 75 | 245 | 1507 | AAGCCAAATACATCACTTGCCACTA | Antisense | 2597 |
| 226470_at | 145 | 409 | 2343 | CTGGCCCCGAGCTTAGGGATGTGCT | Antisense | 2598 |
| 226470_at | 612 | 889 | 2345 | GGCCCCGAGCTTAGGGATGTGCTTG | Antisense | 2599 |
| 226470_at | 870 | 765 | 2363 | GTGCTTGCAAACCCTTCTCAAGGGT | Antisense | 2600 |
| 226470_at | 544 | 1135 | 2377 | TTCTCAAGGGTCTCACAACCCCAAC | Antisense | 2601 |
| 226470_at | 779 | 419 | 2396 | CCCAACATCTTCAGACTGGCCTGAC | Antisense | 2602 |
| 226470_at | 716 | 299 | 2398 | CAACATCTTCAGACTGGCCTGACCT | Antisense | 2603 |
| 226470_at | 726 | 1073 | 2477 | TAGGAATTTTTTAATGGACCATCAT | Antisense | 2604 |
| 226470_at | 532 | 853 | 2492 | GGACCATCATAGGGAGGGGGTGCTC | Antisense | 2605 |
| 226470_at | 89 | 351 | 2499 | CATAGGGAGGGGGTGCTCCTCTTTT | Antisense | 2606 |
| 226470_at | 238 | 381 | 2517 | CTCTTTTCCCACCAGGTTGAGGTGG | Antisense | 2607 |
| 226470_at | 30 | 1139 | 2547 | TTGCATCGGGGGTCCCCAGGGTATG | Antisense | 2608 |
| 226515_at | 943 | 359 | 633 | CTTCCTCGCAGCAAGCGGCTGGAGA | Antisense | 2609 |
| 226515_at | 304 | 413 | 695 | CGTCGCCGCTGACCTAGAGATGGCA | Antisense | 2610 |
| 226515_at | 573 | 153 | 706 | ACCTAGAGATGGCAGCCGGTCTCAC | Antisense | 2611 |
| 226515_at | 321 | 409 | 722 | CGGTCTCACCGACATATTTCAGCAT | Antisense | 2612 |
| 226515_at | 364 | 559 | 788 | GAATGGCAGACTCATGTGGCTCTAT | Antisense | 2613 |
| 226515_at | 121 | 1059 | 819 | TACTGGGAACTCGTTGTCGAACTGA | Antisense | 2614 |
| 226515_at | 700 | 513 | 905 | GCTTTTAGTGACTCGAGGCCAGGCA | Antisense | 2615 |
| 226515_at | 427 | 435 | 1020 | CCGCCACCGTCTGAGCAGAAGTGCA | Antisense | 2616 |
| 226515_at | 1109 | 1021 | 1053 | TCAGAGACAGAGGGTCTCCTCCCGA | Antisense | 2617 |
| 226515_at | 458 | 383 | 1080 | CTCTGCCGCTGTTGGGGATATGGTT | Antisense | 2618 |
| 226515_at | 179 | 721 | 1149 | GTATAACCTCGTATTTTAGCTCCAG | Antisense | 2619 |
| 226538_at | 345 | 1125 | 463 | TTAACCAGCAAGTTTCTGCTTTTTA | Antisense | 2620 |
| 226538_at | 955 | 35 | 563 | ATAATTTAATGTCTCTGGCACACAC | Antisense | 2621 |
| 226538_at | 944 | 307 | 581 | CACACACTAAAAACCATACACTTCA | Antisense | 2622 |
| 226538_at | 869 | 349 | 595 | CATACACTTCAGTTGTGATCTCAGT | Antisense | 2623 |
| 226538_at | 663 | 667 | 662 | GATGTTCAGTTGACCAAGTAGTTCA | Antisense | 2624 |
| 226538_at | 85 | 647 | 721 | GAGTTTGTGACTGCAGTGTTCAAGA | Antisense | 2625 |
| 226538_at | 699 | 125 | 743 | AGAACTCAGCATCCTTGTTTTCTAC | Antisense | 2626 |
| 226538_at | 122 | 15 | 811 | ATTATCATGATCTTCCCATGCCTTT | Antisense | 2627 |
| 226538_at | 1064 | 971 | 829 | TGCCTTTGTTGTACTTGTGCCGAAG | Antisense | 2628 |
| 226538_at | 700 | 775 | 853 | GTGTTTTGATATTCCTTTGTCTGGA | Antisense | 2629 |
| 226538_at | 676 | 1111 | 905 | TTTTGTTCACCTTGGAATCAACAGG | Antisense | 2630 |
| 226854_at | 474 | 207 | 91 | AAAGGATTTTGTGGAGTCGCCCCAG | Antisense | 2631 |
| 226854_at | 152 | 481 | 116 | GCCTGACGGCGTTAATTATCCCTGG | Antisense | 2632 |
| 226854_at | 854 | 1033 | 128 | TAATTATCCCTGGCTTTCATCTTGA | Antisense | 2633 |
| 226854_at | 662 | 357 | 148 | CTTGATGCTCTTGCAGGGGAGGCTC | Antisense | 2634 |
| 226854_at | 507 | 509 | 169 | GCTCAAGATGCCTTGTGGCTCGACC | Antisense | 2635 |
| 226854_at | 277 | 691 | 228 | GTTGAAACCTTGATCTGGGCCTGAC | Antisense | 2636 |
| 226854_at | 431 | 977 | 300 | TCCAGAGGGGGAGTCACTGCCACGA | Antisense | 2637 |
| 226854_at | 951 | 335 | 322 | CGAAGGTTGCCCAGAACTTTCCTTG | Antisense | 2638 |
| 226854_at | 295 | 391 | 347 | CTGCAAAAAGCCCCAAGACTTCTCC | Antisense | 2639 |
| 226854_at | 556 | 1147 | 390 | TTGCCATCGCGTTCTAAAAGCTGAC | Antisense | 2640 |
| 226854_at | 404 | 303 | 426 | CAACACTGTTCTCCCTGAGTAGGGT | Antisense | 2641 |
| 226971_at | 140 | 843 | 1991 | GGAGGCCTGAATACAGGCGGTCACC | Antisense | 2642 |
| 226971_at | 931 | 885 | 2006 | GGCGGTCACCTAAGGTGGTGCGTAC | Antisense | 2643 |
| 226971_at | 1050 | 907 | 2021 | TGGTGCGTACAGTGTTGGGCCACAT | Antisense | 2644 |
| 226971_at | 632 | 791 | 2037 | GGGCCACATGTCTAGTGGTGCCAGG | Antisense | 2645 |
| 226971_at | 879 | 613 | 2061 | GACTGAGAGATCACTTACCTCCACC | Antisense | 2646 |
| 226971_at | 790 | 637 | 2105 | GAGACTGATCCACAATGTTCCTGAG | Antisense | 2647 |
| 226971_at | 1064 | 293 | 2117 | CAATGTTCCTGAGGTGTCTTGGGCA | Antisense | 2648 |
| 226971_at | 267 | 779 | 2130 | GTGTCTTGGGCACCCATAGGCAGGT | Antisense | 2649 |
| 226971_at | 360 | 1075 | 2146 | TAGGCAGGTGACTTCTGGCTTAGGG | Antisense | 2650 |
| 226971_at | 528 | 879 | 2162 | GGCTTAGGGCAGGGTTCAGGAGGCT | Antisense | 2651 |
| 226971_at | 87 | 381 | 2202 | CTCTTTGGTCCCCACAGAACATGTT | Antisense | 2652 |
| 226972_s_at | 393 | 719 | 2224 | GTTTGGGTTGTGGAAGCCTATGGTA | Antisense | 2653 |
| 226972_s_at | 263 | 865 | 2235 | GGAAGCCTATGGTATTCTTGGCTAT | Antisense | 2654 |
| 226972_s_at | 708 | 1015 | 2250 | TCTTGGCTATTGCAGCTGTGGCTCT | Antisense | 2655 |
| 226972_s_at | 886 | 915 | 2266 | TGTGGCTCTGTATGTGTTACCCAAC | Antisense | 2656 |
| 226972_s_at | 870 | 917 | 2278 | TGTGTTACCCAACATGCGACAGCAG | Antisense | 2657 |
| 226972_s_at | 938 | 967 | 2292 | TGCGACAGCAGGAGTCAGAGTTCTG | Antisense | 2658 |
| 226972_s_at | 723 | 97 | 2304 | AGTCAGAGTTCTGCCTCATGGAGTG | Antisense | 2659 |
| 226972_s_at | 620 | 903 | 2322 | TGGAGTGATGGCAGACCTTGGCCAG | Antisense | 2660 |
| 226972_s_at | 512 | 325 | 2379 | CAGCTTTGGGCAGGACACACTGTGC | Antisense | 2661 |
| 226972_s_at | 51 | 585 | 2463 | GAAAAGGCTTGTGGGGAGCGGCTGA | Antisense | 2662 |
| 226972_s_at | 1065 | 983 | 2496 | TCCTGCCTTGTGTAAGAACCTGAGT | Antisense | 2663 |
| 227073_at | 738 | 1065 | 741 | TAGCATTAGCTTTACTTGGAGGGGA | Antisense | 2664 |
| 227073_at | 765 | 687 | 814 | GATTTGATGTATTCTTACTTTTCCA | Antisense | 2665 |
| 227073_at | 973 | 495 | 890 | GCTGGAGAGGCTTATGGGCAATATG | Antisense | 2666 |
| 227073_at | 605 | 563 | 914 | GAAGTGGGCCAAATTCTTGCAATAC | Antisense | 2667 |
| 227073_at | 394 | 9 | 926 | ATTCTTGCAATACACCCTATTCAAT | Antisense | 2668 |
| 227073_at | 215 | 1045 | 1058 | TAAAATTTGCTACCCTGAATTCTGA | Antisense | 2669 |
| 227073_at | 710 | 1149 | 1064 | TTGCTACCCTGAATTCTGAAATATT | Antisense | 2670 |
| 227073_at | 860 | 225 | 1105 | AAAATACTTTTAATGTCTGACATCT | Antisense | 2671 |
| 227073_at | 877 | 753 | 1119 | GTCTGACATCTCTTACATTTCACAT | Antisense | 2672 |
| 227073_at | 145 | 181 | 1133 | ACATTTCACATGGTTCTTTTTATTC | Antisense | 2673 |
| 227073_at | 1017 | 195 | 1233 | AAATTTACCCTTTGACATAATAATG | Antisense | 2674 |
| 227119_at | 790 | 95 | 266 | AGTGCCATGTAATTGTAGCTTGCTA | Antisense | 2675 |
| 227119_at | 341 | 1103 | 326 | TTTAACCATTTAACACTCTCTGCCA | Antisense | 2676 |
| 227119_at | 746 | 123 | 358 | AGAAAGTGGTTCTACTCTTACTGAA | Antisense | 2677 |
| 227119_at | 888 | 363 | 374 | CTTACTGAACACATTCTCTCTGACA | Antisense | 2678 |
| 227119_at | 1139 | 947 | 394 | TGACAAAATCACCAGCTGCTTTATT | Antisense | 2679 |
| 227119_at | 965 | 357 | 459 | CTTGACCAAAACTGCTCAGCTGAGA | Antisense | 2680 |
| 227119_at | 1115 | 333 | 577 | CAGTCCTGCCTTTTAAATCTTGTGG | Antisense | 2681 |
| 227119_at | 26 | 277 | 592 | AATCTTGTGGCAGCTCAGAAGGGAG | Antisense | 2682 |
| 227119_at | 554 | 695 | 674 | GATTGGTTACTGCTCACACATGATG | Antisense | 2683 |
| 227119_at | 883 | 23 | 710 | ATATATGCTTGTTTCCTTGCACCTG | Antisense | 2684 |
| 227119_at | 763 | 1095 | 758 | TTTCCTTCCCCTGTAGGCAATAAAT | Antisense | 2685 |
| 227135_at | 765 | 981 | 290 | TCCTCATTTAACTTTACAACCTTGC | Antisense | 2686 |
| 227135_at | 555 | 193 | 305 | ACAACCTTGCGAAGTGGGTCCAGGA | Antisense | 2687 |
| 227135_at | 718 | 99 | 353 | AGTAATGGGCATTGTCCTGCATTCC | Antisense | 2688 |
| 227135_at | 397 | 1041 | 408 | TAAGCTTCTATCCTGGCCTGAATAA | Antisense | 2689 |
| 227135_at | 1131 | 823 | 446 | GGTCTCAGAGATCAAGCCATATCCT | Antisense | 2690 |
| 227135_at | 580 | 453 | 462 | CCATATCCTCAGGCCTTATTTCCAT | Antisense | 2691 |
| 227135_at | 98 | 155 | 509 | ACCTTTGCTTCTCCGCTAATGAAAT | Antisense | 2692 |
| 227135_at | 662 | 943 | 533 | TGAGCTGGCAAGACCTCTGTTCATT | Antisense | 2693 |
| 227135_at | 391 | 579 | 611 | GAACTCTATTTCGAACCAAGCCTGT | Antisense | 2694 |
| 227135_at | 867 | 387 | 735 | CTCCTTCTTTCTCAATAGCTACTTT | Antisense | 2695 |
| 227135_at | 848 | 1063 | 750 | TAGCTACTTTCTTACTGCTTTTTGA | Antisense | 2696 |
| 227165_at | 323 | 859 | 2196 | GGACACCCAGTAGACCCTGAATTTC | Antisense | 2697 |
| 227165_at | 1101 | 1101 | 2217 | TTTCACTCTCTCTAAAAGGTTCTGA | Antisense | 2698 |
| 227165_at | 1127 | 443 | 2264 | CCTCCTGTGCACTGTTAGCTATGGC | Antisense | 2699 |
| 227165_at | 89 | 931 | 2276 | TGTTAGCTATGGCCACGGGAGCCTC | Antisense | 2700 |
| 227165_at | 627 | 459 | 2300 | CCAGAGCTGCCTGGTAGCTTCAGGT | Antisense | 2701 |
| 227165_at | 506 | 827 | 2322 | GGTTGACCTGCTTATCAGGCCTACG | Antisense | 2702 |
| 227165_at | 1001 | 889 | 2339 | GGCCTACGATCCTTCTGATTTAAGT | Antisense | 2703 |
| 227165_at | 790 | 853 | 2444 | GGACCTAGCATACCGTGGAGAACCA | Antisense | 2704 |
| 227165_at | 553 | 593 | 2574 | GAAAGTCAAATGGGGGACCTGTCCA | Antisense | 2705 |
| 227165_at | 74 | 761 | 2594 | GTCCATTGTGCTCTATTAATCTTGT | Antisense | 2706 |
| 227165_at | 970 | 197 | 2640 | AAATTTGAGTTTGTCCTTGTTCTAG | Antisense | 2707 |
| 227263_at | 864 | 235 | 607 | AACTCACTCATTGTCAGGTGTCCGT | Antisense | 2708 |
| 227263_at | 165 | 779 | 624 | GTGTCCGTGGAGTGTTTTTGGCATG | Antisense | 2709 |
| 227263_at | 249 | 1091 | 640 | TTTGGCATGGTGACCTGTCTGGGCC | Antisense | 2710 |
| 227263_at | 5 | 793 | 660 | GGGCCCAGCATGTTGCAGATGTGTA | Antisense | 2711 |
| 227263_at | 522 | 725 | 698 | GTATGCATATCTCTGTGTGACTGTC | Antisense | 2712 |
| 227263_at | 568 | 1149 | 727 | TTGCAAGCTGGCTGGATCCAACCAT | Antisense | 2713 |
| 227263_at | 684 | 811 | 789 | GGGGGAGGTCACTGCAGAAGGATGG | Antisense | 2714 |
| 227263_at | 1080 | 69 | 810 | ATGGAACTGACCTTTATTCCCCAGT | Antisense | 2715 |
| 227263_at | 478 | 437 | 928 | CCGGACTCCTGAAGACTGCACAAGG | Antisense | 2716 |
| 227263_at | 661 | 383 | 1013 | CTCTGCTCCGTACTAGCGTTTACAG | Antisense | 2717 |
| 227263_at | 24 | 971 | 1056 | TGCCTGTACTAGTTTTTAGACCCCA | Antisense | 2718 |
| 227265_at | 1000 | 181 | 1401 | ACATCTGCTAGAACCTTTTGCCTTA | Antisense | 2719 |
| 227265_at | 885 | 449 | 1414 | CCTTTTGCCTTAACTATTCACCAAT | Antisense | 2720 |
| 227265_at | 319 | 13 | 1480 | ATTAGAATCTTGTCTTGGTTCCATT | Antisense | 2721 |
| 227265_at | 779 | 665 | 1507 | GATGGCTAATATTTGTTATCTTAAT | Antisense | 2722 |
| 227265_at | 325 | 19 | 1539 | ATTTCTGAGGTCATGATTACTTGAA | Antisense | 2723 |
| 227265_at | 864 | 1 | 1565 | ATATTGACTAAAACTGGGTCCTTAG | Antisense | 2724 |
| 227265_at | 290 | 805 | 1580 | GGGTCCTTAGAAATTCCAGGTGGAG | Antisense | 2725 |
| 227265_at | 128 | 789 | 1599 | GTGGAGCTGATTTACCTATGACTGA | Antisense | 2726 |
| 227265_at | 512 | 289 | 1671 | AATTAATGACACATCTGTTCAATAA | Antisense | 2727 |
| 227265_at | 1066 | 739 | 1802 | GTAATGTCATCACAATAAGCTCTTG | Antisense | 2728 |
| 227265_at | 778 | 277 | 1852 | AATTAGGTTTATGTTTCATGTCTTT | Antisense | 2729 |
| 227908_at | 38 | 1013 | 441 | TCTTCACCCTACAACATCTATGTTA | Antisense | 2730 |
| 227908_at | 1085 | 223 | 596 | AAAATGCCTCCCACAATTGCAGACT | Antisense | 2731 |
| 227908_at | 517 | 197 | 608 | ACAATTGCAGACTCACTCATTTTAC | Antisense | 2732 |
| 227908_at | 884 | 1153 | 646 | TTGTCAACACCTTTTCTTGGGACCA | Antisense | 2733 |
| 227908_at | 240 | 261 | 679 | AAGTCAGTGGATACCGTGTCCTGTA | Antisense | 2734 |
| 227908_at | 613 | 779 | 694 | GTGTCCTGTAGACATGTCACTTGTG | Antisense | 2735 |
| 227908_at | 978 | 267 | 721 | AAGGCACGGACAACATGAACTGGCA | Antisense | 2736 |
| 227908_at | 775 | 931 | 811 | TGATTTTACCTCTTAGTTCTTACGA | Antisense | 2737 |
| 227908_at | 374 | 561 | 834 | GAAGGATGGTTATCGGGCTGGAAAA | Antisense | 2738 |
| 227908_at | 1049 | 167 | 870 | ACTGATGCTTTGGAGCCTCTCAATG | Antisense | 2739 |
| 227908_at | 426 | 687 | 934 | GATTTGCAGCACAATCCAACTTTGA | Antisense | 2740 |
| 227927_at | 779 | 1061 | 1233 | TACCTCTGTCGACCTGTGAAACTGA | Antisense | 2741 |
| 227927_at | 587 | 445 | 1235 | CCTCTGTCGACCTGTGAAACTGAAC | Antisense | 2742 |
| 227927_at | 525 | 589 | 1250 | GAAACTGAACAAACAGCTTATCTGC | Antisense | 2743 |
| 227927_at | 631 | 515 | 1265 | GCTTATCTGCCCCTAATGTGAAATG | Antisense | 2744 |
| 227927_at | 230 | 365 | 1266 | CTTATCTGCCCCTAATGTGAAATGA | Antisense | 2745 |
| 227927_at | 753 | 45 | 1269 | ATCTGCCCCTAATGTGAAATGATGG | Antisense | 2746 |
| 227927_at | 467 | 485 | 1273 | GCCCCTAATGTGAAATGATGGGACA | Antisense | 2747 |
| 227927_at | 867 | 277 | 1400 | AATCCAGCAGGAGTTTCTTAGTTAG | Antisense | 2748 |
| 227927_at | 1130 | 715 | 1412 | GTTTCTTAGTTAGGATCCACAGCCT | Antisense | 2749 |
| 227927_at | 811 | 363 | 1416 | CTTAGTTAGGATCCACAGCCTGGGA | Antisense | 2750 |
| 227927_at | 909 | 999 | 1483 | TCTGCATTTCTTGAAACCATTATTA | Antisense | 2751 |
| 227929_at | 179 | 647 | 2213 | GAGTTCATGTGTCTAATCATTATCT | Antisense | 2752 |
| 227929_at | 758 | 37 | 2364 | ATCACATCAGTAGCAAACACAGGGT | Antisense | 2753 |
| 227929_at | 959 | 309 | 2381 | CACAGGGTGGGAACTCAATCTTATG | Antisense | 2754 |
| 227929_at | 804 | 279 | 2397 | AATCTTATGTTATAGCTTACTCTTA | Antisense | 2755 |
| 227929_at | 73 | 287 | 2487 | AATATTTCAGTGACTTTTCAGATTT | Antisense | 2756 |
| 227929_at | 899 | 687 | 2507 | GATTTATTTCTTGTTAGCCGCTGTG | Antisense | 2757 |
| 227929_at | 434 | 145 | 2522 | AGCCGCTGTGTCTATTTGGTGCTAC | Antisense | 2758 |
| 227929_at | 1037 | 1109 | 2658 | TTTTCTCACCATTTGCATGTACATC | Antisense | 2759 |
| 227929_at | 495 | 181 | 2678 | ACATCATGTCTTTCCAATTGTTTTC | Antisense | 2760 |
| 227929_at | 34 | 1159 | 2729 | TTGTGCAGTGGTTCAACCTGACCAA | Antisense | 2761 |
| 227929_at | 449 | 787 | 2755 | GTGGTATTATGCTGCTGGGAAGTAA | Antisense | 2762 |
| 228017_s_at | 378 | 479 | 799 | GCCTGCGTAAGTGAGGAAACAGCTG | Antisense | 2763 |
| 228017_s_at | 374 | 939 | 810 | TGAGGAAACAGCTGATCCTGCTCCT | Antisense | 2764 |
| 228017_s_at | 441 | 377 | 847 | CTCAGCGACCGACCAGTGACAATGA | Antisense | 2765 |
| 228017_s_at | 979 | 151 | 858 | ACCAGTGACAATGACAGGAGCTCCC | Antisense | 2766 |
| 228017_s_at | 337 | 769 | 862 | GTGACAATGACAGGAGCTCCCAGGC | Antisense | 2767 |
| 228017_s_at | 1106 | 383 | 933 | CTGCCCTGGGTTCTAAGTACTGGAC | Antisense | 2768 |
| 228017_s_at | 317 | 487 | 935 | GCCCTGGGTTCTAAGTACTGGACAC | Antisense | 2769 |
| 228017_s_at | 154 | 807 | 940 | GGGTTCTAAGTACTGGACACCAGCC | Antisense | 2770 |
| 228017_s_at | 48 | 317 | 983 | CACGGCTGGCTGCAGCGTCAAGAGA | Antisense | 2771 |
| 228017_s_at | 987 | 495 | 987 | GCTGGCTGCAGCGTCAAGAGAGTTT | Antisense | 2772 |
| 228017_s_at | 1105 | 501 | 991 | GCTGCAGCGTCAAGAGAGTTTGTAA | Antisense | 2773 |
| 228054_at | 355 | 239 | 979 | AACGGAATACCTGCTAGGTTCCAGG | Antisense | 2774 |
| 228054_at | 880 | 709 | 1038 | GTTAGATCTCAGCAGAGCCCATTCT | Antisense | 2775 |
| 228054_at | 1043 | 143 | 1053 | AGCCCATTCTGCAAGACCTGGCTGA | Antisense | 2776 |
| 228054_at | 184 | 193 | 1123 | ACACAGGAACCGAGACCTGGCTTCC | Antisense | 2777 |
| 228054_at | 886 | 855 | 1193 | GGACTGTGTGGCCAACCAAGTGCTT | Antisense | 2778 |
| 228054_at | 689 | 305 | 1242 | CAAAGCAAACTGCTCCGGGTACCAG | Antisense | 2779 |
| 228054_at | 837 | 443 | 1272 | CCTCCAACCTGGCAAGGGTGTGCGC | Antisense | 2780 |
| 228054_at | 10 | 795 | 1304 | GGGCTTGCAGGTGAGGGGGCTGTAT | Antisense | 2781 |
| 228054_at | 425 | 813 | 1319 | GGGGCTGTATGCTTCAGGAACTAAC | Antisense | 2782 |
| 228054_at | 244 | 1031 | 1383 | TCAAGCACAGCAATCCCATTTGGGA | Antisense | 2783 |
| 228054_at | 234 | 817 | 1434 | GGTAAGGGCGCATGGAATGGGGCTA | Antisense | 2784 |
| 228071_at | 1072 | 79 | 679 | AGGAGTTGGTGGAGCTGATAGAGAA | Antisense | 2785 |
| 228071_at | 259 | 821 | 707 | GGTGCAGTGCAACGAAGGGGCTTAC | Antisense | 2786 |
| 228071_at | 2 | 951 | 714 | TGCAACGAAGGGGCTTACTTTTCTG | Antisense | 2787 |
| 228071_at | 410 | 1137 | 734 | TTCTGATGACATATACAAGGACACA | Antisense | 2788 |
| 228071_at | 563 | 661 | 791 | GAGGAAAATCTACACTGACCAATTA | Antisense | 2789 |
| 228071_at | 447 | 27 | 964 | ATAGGATTTGGAAGATGCTTTCAGA | Antisense | 2790 |
| 228071_at | 15 | 597 | 987 | GAAATATGGCATAGGTTTTTGTCGA | Antisense | 2791 |
| 228071_at | 260 | 877 | 994 | GGCATAGGTTTTTGTCGAAATGTAA | Antisense | 2792 |
| 228071_at | 651 | 1107 | 1020 | TTTTATTCTTCCTAATTTACTGTGA | Antisense | 2793 |
| 228071_at | 603 | 1013 | 1026 | TCTTCCTAATTTACTGTGATTTGTT | Antisense | 2794 |
| 228071_at | 599 | 681 | 1075 | GATAGTTAGAGAAATACCTCCTTCC | Antisense | 2795 |
| 228094_at | 149 | 803 | 193 | GGGAGAAACACATTTACTCCCCAAT | Antisense | 2796 |
| 228094_at | 1102 | 373 | 272 | CTACATGACCATGCACCCAGTTTGG | Antisense | 2797 |
| 228094_at | 156 | 85 | 306 | AGGTCAGATCGGAACAACTCACTTG | Antisense | 2798 |
| 228094_at | 371 | 559 | 381 | GAATGGAGAGTCCCTTCATCTCAGC | Antisense | 2799 |
| 228094_at | 758 | 1023 | 401 | TCAGCAGCGGTGGAGACTCTCTCCT | Antisense | 2800 |
| 228094_at | 352 | 381 | 443 | CTCTACCAGTGATTTCAGACTCCCG | Antisense | 2801 |
| 228094_at | 1 | 667 | 514 | GATGGAGAATTTGGAGCCTGGCAGA | Antisense | 2802 |
| 228094_at | 364 | 109 | 538 | AGAGACTGGACAGCTCTGGAGGAAC | Antisense | 2803 |
| 228094_at | 295 | 997 | 552 | TCTGGAGGAACAGGCCTGCTGAGGG | Antisense | 2804 |
| 228094_at | 144 | 891 | 594 | GGCCTCTGGAGTGGGACACTGGCCC | Antisense | 2805 |
| 228094_at | 640 | 439 | 671 | CCTGTGGGCAGGGTTCTTAGTGGAT | Antisense | 2806 |
| 228128_x_at | 382 | 667 | 281 | GATGTTGAAACCTGTTTGGCACCTT | Antisense | 2807 |
| 228128_x_at | 666 | 719 | 294 | GTTTGGCACCTTCTGGAAGCTACCA | Antisense | 2808 |
| 228128_x_at | 1075 | 349 | 358 | CATAAGAATTCTACTGGCCTATTGT | Antisense | 2809 |
| 228128_x_at | 690 | 219 | 447 | AAACACAATTCCAATCCTTTTTCTG | Antisense | 2810 |
| 228128_x_at | 199 | 839 | 529 | GGATCTAAGTTAAATCTTTTGGCAA | Antisense | 2811 |
| 228128_x_at | 341 | 173 | 661 | ACTCAGACATATTTTGCTGTTCATG | Antisense | 2812 |
| 228128_x_at | 6 | 441 | 696 | CCTGTTCTCATGGATTTGTTTTCCC | Antisense | 2813 |
| 228128_x_at | 714 | 687 | 708 | GATTTGTTTTCCCATACTGTTTTCT | Antisense | 2814 |
| 228128_x_at | 157 | 351 | 720 | CATACTGTTTTCTCTGATCTCAATT | Antisense | 2815 |
| 228128_x_at | 996 | 43 | 736 | ATCTCAATTACAGGTTGGATCTCAC | Antisense | 2816 |
| 228128_x_at | 618 | 15 | 786 | ATTTTGCCACTGTTGATTACTATAC | Antisense | 2817 |
| 228492_at | 976 | 243 | 132 | AACCAATACACAAAATTTTCCTATG | Antisense | 2818 |
| 228492_at | 476 | 15 | 146 | ATTTTCCTATGTCAGAATGTGGTGG | Antisense | 2819 |
| 228492_at | 677 | 21 | 186 | ATTTGGTGTGCTTGCGATTTTTTTT | Antisense | 2820 |
| 228492_at | 1018 | 1135 | 250 | TTCTCCTGATCCCGGTGAAGTGTAC | Antisense | 2821 |
| 228492_at | 861 | 675 | 257 | GATCCCGGTGAAGTGTACATCATAA | Antisense | 2822 |
| 228492_at | 254 | 93 | 268 | AGTGTACATCATAAGAATCCATAGT | Antisense | 2823 |
| 228492_at | 298 | 1055 | 292 | TACTTTGAAGTACCATTGCACCAAG | Antisense | 2824 |
| 228492_at | 189 | 153 | 303 | ACCATTGCACCAAGATGTCTGACTG | Antisense | 2825 |
| 228492_at | 543 | 753 | 319 | GTCTGACTGAATTCATAGTCACACT | Antisense | 2826 |
| 228492_at | 949 | 1039 | 419 | TAAGATCTAAGCTCCTGCTTATTTA | Antisense | 2827 |
| 228492_at | 2 | 683 | 595 | GATACAGCCTATCCTATACTATTTA | Antisense | 2828 |
| 228565_at | 474 | 1077 | 464 | TATGTCCTCAGTTTTACTTCTACCA | Antisense | 2829 |
| 228565_at | 1148 | 219 | 488 | AAAACATCCCTGTATGTGTGTGCAT | Antisense | 2830 |
| 228565_at | 1048 | 781 | 565 | GTGTGTGTTGGGGAGTGTATGTGAT | Antisense | 2831 |
| 228565_at | 791 | 777 | 579 | GTGTATGTGATCTGGGTGTTTGTTT | Antisense | 2832 |
| 228565_at | 905 | 929 | 599 | TGTTTATCTCTGTTATTATTCCCCT | Antisense | 2833 |
| 228565_at | 980 | 365 | 622 | CTTTAGCTTTATTTTAGTCAACTCT | Antisense | 2834 |
| 228565_at | 641 | 289 | 699 | AATTCAATCTCACATGTTACTGCAG | Antisense | 2835 |
| 228565_at | 206 | 685 | 723 | GATAGTTAACTTTTGCTGCAATCTA | Antisense | 2836 |
| 228565_at | 930 | 225 | 853 | AAAATTAAGGTACTCTCACTGCAGA | Antisense | 2837 |
| 228565_at | 979 | 269 | 883 | AAGGCCTGGGCCTAATGTGCTGTAT | Antisense | 2838 |
| 228565_at | 1140 | 763 | 899 | GTGCTGTATTATGAAGCCTTGTGAC | Antisense | 2839 |
| 228604_at | 845 | 593 | 622 | GAAATGGTGGTTTCCTTCTGATAAG | Antisense | 2840 |
| 228604_at | 731 | 853 | 656 | GGACCATGTCGCTTATATATCACCC | Antisense | 2841 |
| 228604_at | 1139 | 415 | 665 | CGCTTATATATCACCCTACTAGGGG | Antisense | 2842 |
| 228604_at | 898 | 685 | 689 | GATATAATTTTCCCTTCTAAGCAAG | Antisense | 2843 |
| 228604_at | 313 | 271 | 717 | AATGGCAGTGCTAAATAGTTTTGTA | Antisense | 2844 |
| 228604_at | 299 | 287 | 785 | AATATTTTTCAGATGCATTTGCATT | Antisense | 2845 |
| 228604_at | 637 | 855 | 868 | GGACTGAAATTCTGTTACATGATGT | Antisense | 2846 |
| 228604_at | 585 | 23 | 954 | ATATAAAGCAAATTCACACGTTTTC | Antisense | 2847 |
| 228604_at | 865 | 589 | 1011 | GAAACCTCAGTCTTGAAATTTTGAT | Antisense | 2848 |
| 228604_at | 786 | 219 | 1040 | AAAAATCATGACACTGTTTTACCAT | Antisense | 2849 |
| 228604_at | 882 | 645 | 1071 | GAGTAGCTAACTTTTGGTAACACCT | Antisense | 2850 |
| 228812_at | 843 | 637 | 765 | GAGACTTCATTGGTGATACACTCAA | Antisense | 2851 |
| 228812_at | 406 | 775 | 777 | GTGATACACTCAATTTTTACTGGGT | Antisense | 2852 |
| 228812_at | 488 | 509 | 807 | GCTAATAATGTTGGTCACTGTCTCA | Antisense | 2853 |
| 228812_at | 742 | 301 | 869 | CACAAAGCTTTTGGGTAACCAGCGT | Antisense | 2854 |
| 228812_at | 873 | 805 | 881 | GGGTAACCAGCGTTCTTAAATGTAT | Antisense | 2855 |
| 228812_at | 552 | 1075 | 903 | TATGGTTTTTGACCAGGTGAACCCT | Antisense | 2856 |
| 228812_at | 775 | 623 | 913 | GACCAGGTGAACCCTTTAGAAGTGA | Antisense | 2857 |
| 228812_at | 1155 | 199 | 963 | AAATACCTTTGGCTGTGATGAATGT | Antisense | 2858 |
| 228812_at | 1101 | 953 | 981 | TGAATGTAGATCCCAGCAGAATACC | Antisense | 2859 |
| 228812_at | 137 | 1153 | 1021 | TTGACTGAGTATTTGTAGATGCTTA | Antisense | 2860 |
| 228812_at | 198 | 259 | 1091 | AAGTTCTCAGGTACTGTTCAATTAT | Antisense | 2861 |
| 229022_at | 446 | 587 | 826 | GAAACACTTTTAGAGCACTTGAGGA | Antisense | 2862 |
| 229022_at | 167 | 27 | 937 | ATAGGACCCCAGACAGTTTATACCT | Antisense | 2863 |
| 229022_at | 124 | 715 | 952 | GTTTATACCTTCCATTTGCTGTTTT | Antisense | 2864 |
| 229022_at | 697 | 263 | 979 | AAGTGTGAGCCTGCCAAGTCAACAA | Antisense | 2865 |
| 229022_at | 990 | 479 | 987 | GCCTGCCAAGTCAACAAGTATGCCT | Antisense | 2866 |
| 229022_at | 645 | 297 | 1001 | CAAGTATGCCTTTAGCGCACATGTA | Antisense | 2867 |
| 229022_at | 328 | 311 | 1018 | CACATGTAAATAGCCTGCACTTCCT | Antisense | 2868 |
| 229022_at | 744 | 539 | 1034 | GCACTTCCTAAATCTCGTGTGGCCT | Antisense | 2869 |
| 229022_at | 835 | 15 | 1195 | ATTTTGCCACATTCTGTAACTGTTT | Antisense | 2870 |
| 229022_at | 529 | 1101 | 1256 | TTTCATCTTTTGTTTCGTGTATATA | Antisense | 2871 |
| 229022_at | 845 | 777 | 1272 | GTGTATATACTGTTTGCCTTTTTCA | Antisense | 2872 |
| 229026_at | 953 | 205 | 268 | AAAGGCCCACTGATAATGCTGCACT | Antisense | 2873 |
| 229026_at | 20 | 465 | 352 | CCACTTCATGCCTACATCATGGGAA | Antisense | 2874 |
| 229026_at | 222 | 531 | 396 | GCAGATCACTGCTAACAATCCACAT | Antisense | 2875 |
| 229026_at | 1109 | 1129 | 430 | TTCAGTTTCCCTTGCTTAACATTTG | Antisense | 2876 |
| 229026_at | 85 | 225 | 504 | AAAATCCTATTTAATTCGCTTCAAT | Antisense | 2877 |
| 229026_at | 1038 | 943 | 562 | TGACCTCTTGAGATTTACAACCCCC | Antisense | 2878 |
| 229026_at | 24 | 1015 | 669 | TCTTGATTTTATTGGCACCTCCCAG | Antisense | 2879 |
| 229026_at | 550 | 341 | 691 | CAGGCACTTTGGCATGTGCTCCTGT | Antisense | 2880 |
| 229026_at | 1136 | 777 | 721 | GTGTAGTTACTGTGCCTGTAGAGTT | Antisense | 2881 |
| 229026_at | 946 | 597 | 774 | GACAAGTCCACTTTTGGCTTACCAT | Antisense | 2882 |
| 229026_at | 340 | 343 | 796 | CATGGAGATCTGCTCCAACACATGC | Antisense | 2883 |
| 229047_at | 140 | 441 | 13 | CCTGTGATGATAGCTTCTTCCCATG | Antisense | 2884 |
| 229047_at | 182 | 919 | 15 | TGTGATGATAGCTTCTTCCCATGTG | Antisense | 2885 |
| 229047_at | 968 | 683 | 21 | GATAGCTTCTTCCCATGTGGGGATT | Antisense | 2886 |
| 229047_at | 1132 | 515 | 25 | GCTTCTTCCCATGTGGGGATTAAGG | Antisense | 2887 |
| 229047_at | 375 | 841 | 36 | TGTGGGGATTAAGGGTAGGGAGTGG | Antisense | 2888 |
| 229047_at | 728 | 557 | 64 | GAATGGTCCAAACCCGGAAGGAGCT | Antisense | 2889 |
| 229047_at | 723 | 821 | 68 | GGTCCAAACCCGGAAGGAGCTAATG | Antisense | 2890 |
| 229047_at | 132 | 851 | 83 | GGAGCTAATGGAGAGGATAGGGCCA | Antisense | 2891 |
| 229047_at | 43 | 89 | 101 | AGGGCCAAAGTGGGACAGGGCTTGG | Antisense | 2892 |
| 229047_at | 1146 | 85 | 109 | AGTGGGACAGGGCTTGGATGGTAGA | Antisense | 2893 |
| 229047_at | 898 | 919 | 427 | TGTAGACGCGCACCGGGGTGGAGTT | Antisense | 2894 |
| 229094_at | 421 | 987 | 236 | TCCCCTAGTGAAATCCATCTGTCCT | Antisense | 2895 |
| 229094_at | 577 | 51 | 248 | ATCCATCTGTCCTGAAGGGAACCCT | Antisense | 2896 |
| 229094_at | 1039 | 317 | 323 | CACCAAAGGGAGGCCGCACGGATTC | Antisense | 2897 |
| 229094_at | 573 | 649 | 432 | GAGTAAGACTGAGTCTCCTCACCGA | Antisense | 2898 |
| 229094_at | 78 | 417 | 454 | CGAAGAGATCTGGCTGTATCCCGAG | Antisense | 2899 |
| 229094_at | 134 | 723 | 469 | GTATCCCGAGTCTCTGAAACCTTTG | Antisense | 2900 |
| 229094_at | 518 | 67 | 526 | ATGTGGAGCCGCAAGGGCTCGCCAG | Antisense | 2901 |
| 229094_at | 243 | 883 | 541 | GGCTCGCCAGAGGGATCTCAGGAGC | Antisense | 2902 |
| 229094_at | 17 | 853 | 576 | GGAGCGCTGTTGAGTGACAGGTCTG | Antisense | 2903 |
| 229094_at | 674 | 605 | 591 | GACAGGTCTGATGCAGTAGCTTTTA | Antisense | 2904 |
| 229094_at | 867 | 591 | 645 | GAAAGTCTACCTTTCTAAGTTCAGT | Antisense | 2905 |
| 229308_at | 791 | 625 | 305 | GAGCCATAAAATTGAAGCCAGTAGC | Antisense | 2906 |
| 229308_at | 880 | 293 | 335 | CAATATGGAGGCCTTCTTACTGTAG | Antisense | 2907 |
| 229308_at | 1004 | 725 | 356 | GTAGGGAAGAGGTGTCTAGCTTAGA | Antisense | 2908 |
| 229308_at | 730 | 371 | 396 | CTAGATGAGATTACCCATAGCAGGG | Antisense | 2909 |
| 229308_at | 167 | 955 | 425 | TGAATCATCACCTACCAAAGACTGT | Antisense | 2910 |
| 229308_at | 942 | 251 | 442 | AAGACTGTACGGAAAGGTGTGTTAT | Antisense | 2911 |
| 229308_at | 219 | 521 | 477 | GCATTTTAGTTTGCACACATGTAAA | Antisense | 2912 |
| 229308_at | 193 | 139 | 538 | AGCTCCGCATCCTAAGACTTAAAAC | Antisense | 2913 |
| 229308_at | 675 | 547 | 565 | GCAATTCCTATGCAAATCATCTGCT | Antisense | 2914 |
| 229308_at | 18 | 347 | 582 | CATCTGCTTAACTGAACTACAAACG | Antisense | 2915 |
| 229308_at | 609 | 373 | 598 | CTACAAACGTTTTTCATTAATTCAT | Antisense | 2916 |
| 229575_at | 840 | 559 | 86 | GAAGGCTATGAGTTGCTGCTGGCCC | Antisense | 2917 |
| 229575_at | 1110 | 1057 | 151 | TACTGGTACACTTACATTTCTTGGA | Antisense | 2918 |
| 229575_at | 345 | 533 | 179 | GCAGCAGAAACCTTGGGATATCCTT | Antisense | 2919 |
| 229575_at | 358 | 355 | 201 | CTTGTGGGTCAAGGAGGCAACTCTC | Antisense | 2920 |
| 229575_at | 409 | 389 | 223 | CTCCTCACGGATTCCCTGATTTGAT | Antisense | 2921 |
| 229575_at | 777 | 275 | 271 | AATCCAAGTTTTCACAAGTTTCTCT | Antisense | 2922 |
| 229575_at | 564 | 447 | 315 | CCTAGACCAAGAATTCCTACCACGC | Antisense | 2923 |
| 229575_at | 845 | 1143 | 328 | TTCCTACCACGCAAGGCCTGTGAAA | Antisense | 2924 |
| 229575_at | 405 | 675 | 391 | GATGCCAAAGTACCTGTTTTTATAA | Antisense | 2925 |
| 229575_at | 799 | 293 | 469 | CAATGATTTTTCTGCAGTACCTTAA | Antisense | 2926 |
| 229575_at | 86 | 291 | 524 | AATTCTGCCATGTAGTGCCTTATTT | Antisense | 2927 |
| 229598_at | 248 | 15 | 566 | ATTTTTCTTAGCTAAATCTGGCAAC | Antisense | 2928 |
| 229598_at | 573 | 133 | 636 | AGCAGAATCTGCCATATGAGTAATA | Antisense | 2929 |
| 229598_at | 259 | 649 | 653 | GAGTAATAGAAGTGAGCAGGCCCAG | Antisense | 2930 |
| 229598_at | 304 | 335 | 675 | CAGGACTCCCTAAGTCAAGAAACCA | Antisense | 2931 |
| 229598_at | 19 | 121 | 692 | AGAAACCAAGAGGCGTCATTACGGA | Antisense | 2932 |
| 229598_at | 549 | 209 | 717 | AAAGAGTAACTCACCCTGTGTGCTC | Antisense | 2933 |
| 229598_at | 90 | 143 | 759 | AGCGATGCCCCCATGTTATGAATGG | Antisense | 2934 |
| 229598_at | 747 | 859 | 784 | GGAAAAGTTCACTGAAGGGTTCATA | Antisense | 2935 |
| 229598_at | 796 | 1161 | 846 | TTGGATACCTTCAAGGGATCAGAAA | Antisense | 2936 |
| 229598_at | 394 | 1017 | 899 | TCATCATTACTCTCTACATTATTAT | Antisense | 2937 |
| 229598_at | 448 | 1109 | 983 | TTTTAACTTGTCTGCATGTTTGAAA | Antisense | 2938 |
| 229623_at | 1098 | 299 | 68 | CAACCCAAAGTCTGAATTTCTTGAG | Antisense | 2939 |
| 229623_at | 173 | 867 | 257 | GGAAGATGGCTGTTTCATGTGAGAC | Antisense | 2940 |
| 229623_at | 764 | 665 | 312 | GATGGGGGAGTGAGAATCCCTGTAA | Antisense | 2941 |
| 229623_at | 677 | 1003 | 374 | TCTCCTGTCAAAAAGGCGTCTTACT | Antisense | 2942 |
| 229623_at | 364 | 887 | 388 | GGCGTCTTACTGTAAATAGTCCAAG | Antisense | 2943 |
| 229623_at | 506 | 27 | 403 | ATAGTCCAAGGTGACATTTGTTAGT | Antisense | 2944 |
| 229623_at | 858 | 709 | 422 | GTTAGTTTTGAATACTGCTTTTGGG | Antisense | 2945 |
| 229623_at | 571 | 1109 | 505 | TTTTCTTTTATTCTACACAATCCAA | Antisense | 2946 |
| 229623_at | 660 | 817 | 544 | GGTGATGCAATTGTACACTTTCTTA | Antisense | 2947 |
| 229623_at | 1051 | 283 | 580 | AATACCACATTTTAGCAGAACCAAG | Antisense | 2948 |
| 229623_at | 607 | 947 | 612 | TGACATTATTCATTGGGATCTGGCC | Antisense | 2949 |
| 230164_at | 440 | 421 | 132 | CCCAGCCTCCAACCTAATTTGAGTT | Antisense | 2950 |
| 230164_at | 900 | 1109 | 169 | TTTTCATCACCTTACATGTGTTAAC | Antisense | 2951 |
| 230164_at | 1138 | 117 | 237 | AGACCGTGTTTACATAATCTCTTCT | Antisense | 2952 |
| 230164_at | 85 | 1033 | 278 | TACTTAACCTTTGCATTGGTCCCTT | Antisense | 2953 |
| 230164_at | 867 | 1159 | 293 | TTGGTCCCTTTCAGGCTTGAACAAC | Antisense | 2954 |
| 230164_at | 516 | 723 | 325 | GTATCTGCATCGTGGGGTTGCTGGT | Antisense | 2955 |
| 230164_at | 125 | 659 | 385 | GAGGATATCCCTGTATTAGGCCATT | Antisense | 2956 |
| 230164_at | 738 | 231 | 437 | AACATACAAGACCTGTGGCTACTGG | Antisense | 2957 |
| 230164_at | 329 | 645 | 508 | GAGATTGTTTAGTGGGCCCATGGCT | Antisense | 2958 |
| 230164_at | 96 | 783 | 519 | GTGGGCCCATGGCTAGGTGGGGTAT | Antisense | 2959 |
| 230164_at | 383 | 425 | 566 | CCCTTGGCACAGATCTTTGAGAATC | Antisense | 2960 |
| 230330_at | 197 | 793 | 51 | GGGCCTCTCACAACATGGCAGTTAT | Antisense | 2961 |
| 230330_at | 892 | 1085 | 73 | TATTTGTCCCCAGAGCAAGCAACAC | Antisense | 2962 |
| 230330_at | 813 | 633 | 85 | GAGCAAGCAACACCGGAGGGCAAGG | Antisense | 2963 |
| 230330_at | 47 | 669 | 120 | GATGTTTTTTGTAACCTAGCCTCTG | Antisense | 2964 |
| 230330_at | 288 | 155 | 133 | ACCTAGCCTCTGAAAGTGTCATACC | Antisense | 2965 |
| 230330_at | 440 | 291 | 158 | AATTCTGTATTTTGTTGGTCACACA | Antisense | 2966 |
| 230330_at | 590 | 743 | 175 | GTCACACAGACCAAGTCAACTACAA | Antisense | 2967 |
| 230330_at | 454 | 1027 | 190 | TCAACTACAACGTGGGAGACTCCTA | Antisense | 2968 |
| 230330_at | 231 | 803 | 203 | GGGAGACTCCTACACAAGGCATGAA | Antisense | 2969 |
| 230330_at | 225 | 817 | 236 | GGTGGGCATTTTTAAGTGTCATCTG | Antisense | 2970 |
| 230330_at | 243 | 867 | 260 | GGAAGGAGGCTGTCACAACCTGGAA | Antisense | 2971 |
| 230521_at | 220 | 891 | 327 | GGCCTCCTCCCAAGGAGAACATGAG | Antisense | 2972 |
| 230521_at | 732 | 849 | 340 | GGAGAACATGAGACCACTTCATATC | Antisense | 2973 |
| 230521_at | 27 | 625 | 351 | GACCACTTCATATCTGGAACTCTAG | Antisense | 2974 |
| 230521_at | 603 | 863 | 366 | GGAACTCTAGAAACACTGGCTGCAG | Antisense | 2975 |
| 230521_at | 252 | 1067 | 373 | TAGAAACACTGGCTGCAGCAATCAA | Antisense | 2976 |
| 230521_at | 237 | 135 | 429 | AGCATGGACACTGCTAGCTGGGTTC | Antisense | 2977 |
| 230521_at | 671 | 497 | 480 | GCTGGGTGACCTCGAGCAAGTGACT | Antisense | 2978 |
| 230521_at | 643 | 621 | 487 | GACCTCGAGCAAGTGACTACTCCTC | Antisense | 2979 |
| 230521_at | 714 | 769 | 499 | GTGACTACTCCTCACTGGATTGTAG | Antisense | 2980 |
| 230521_at | 811 | 747 | 541 | GTCATTATTTACAGTTCACCACACG | Antisense | 2981 |
| 230521_at | 608 | 987 | 584 | TCCCTGGATCCTCAAAATAACCTCA | Antisense | 2982 |
| 230760_at | 812 | 221 | 60 | AAAACGTGACACTTTACATATTTCA | Antisense | 2983 |
| 230760_at | 1006 | 769 | 65 | GTGACACTTTACATATTTCATATTT | Antisense | 2984 |
| 230760_at | 645 | 1085 | 85 | TATTTTTCATATAGTCTGGAGGTAT | Antisense | 2985 |
| 230760_at | 529 | 97 | 97 | AGTCTGGAGGTATACACAGTTGTTT | Antisense | 2986 |
| 230760_at | 802 | 83 | 153 | AGGTAATTAAGCATTTGGTCAAGTA | Antisense | 2987 |
| 230760_at | 985 | 291 | 210 | AATTGTGCTTAATGTTATATACTGT | Antisense | 2988 |
| 230760_at | 131 | 1057 | 229 | TACTGTTATTATTTGCAGGCTGGTT | Antisense | 2989 |
| 230760_at | 864 | 1085 | 238 | TATTTGCAGGCTGGTTTTAATTCTT | Antisense | 2990 |
| 230760_at | 798 | 13 | 367 | ATTAGATATTGTATGTCCCTTCCTC | Antisense | 2991 |
| 230760_at | 12 | 757 | 381 | GTCCCTTCCTCTGTACAAATTGTAA | Antisense | 2992 |
| 230760_at | 937 | 1071 | 436 | TAGGAAGTGTGATACTATTGTAAAT | Antisense | 2993 |
| 230968_at | 484 | 775 | 119 | GTGATTAAACATTCTAGACCAGGCT | Antisense | 2994 |
| 230968_at | 202 | 273 | 195 | AATGTCTTTTCTATTGTGGTCTGAT | Antisense | 2995 |
| 230968_at | 129 | 787 | 210 | GTGGTCTGATATCCGTTTCTGTAAT | Antisense | 2996 |
| 230968_at | 1011 | 107 | 236 | AGATCAGTTTGTTGTCCTCTGTGCA | Antisense | 2997 |
| 230968_at | 955 | 981 | 250 | TCCTCTGTGCACCAGTGGTTTTGCC | Antisense | 2998 |
| 230968_at | 223 | 1035 | 277 | TAATTTTTTTTGGCTAGCATCACCA | Antisense | 2999 |
| 230968_at | 813 | 135 | 292 | AGCATCACCAAGATCTGTCATCCAG | Antisense | 3000 |
| 230968_at | 569 | 3 | 358 | ATTGTGCTGCCAGTGGTATTTTCCC | Antisense | 3001 |
| 230968_at | 1043 | 231 | 441 | AACATGCTCATGGAATGTCCACCTT | Antisense | 3002 |
| 230968_at | 655 | 933 | 518 | TGTTGGTGTTGTTAATGTCATGACT | Antisense | 3003 |
| 230968_at | 769 | 689 | 597 | GATTTTCCTCTAGTCCTATGTGAAT | Antisense | 3004 |
| 231084_at | 24 | 29 | 32 | ATAGCAAATTATGCCCTAAGCTGCA | Antisense | 3005 |
| 231084_at | 968 | 487 | 44 | GCCCTAAGCTGCAATCTACGAGAAG | Antisense | 3006 |
| 231084_at | 465 | 567 | 65 | GAAGAGTTGGTAGCTGTCTCAGAGA | Antisense | 3007 |
| 231084_at | 148 | 253 | 93 | AAGACATCTGTAATGCAATGGGGTC | Antisense | 3008 |
| 231084_at | 3 | 547 | 107 | GCAATGGGGTCTAAACTGACTTGTG | Antisense | 3009 |
| 231084_at | 775 | 581 | 206 | GAACAGATTTCAATACTACAGACTG | Antisense | 3010 |
| 231084_at | 559 | 1143 | 258 | TTCCTGCTCTTGTTCAAATGTAAAA | Antisense | 3011 |
| 231084_at | 690 | 217 | 295 | AAACACAAGGCCAAATCAATCATTT | Antisense | 3012 |
| 231084_at | 723 | 597 | 369 | GAAATTGAAGTAGCATGTCCTCTGA | Antisense | 3013 |
| 231084_at | 1099 | 523 | 381 | GCATGTCCTCTGAGTTGCATGTTTT | Antisense | 3014 |
| 231084_at | 546 | 1051 | 441 | TACAAATTTTTGTCCTGCATGAATA | Antisense | 3015 |
| 231094_s_at | 218 | 885 | 217 | GGCTGAGGAGGCTGGTCTGAACATC | Antisense | 3016 |
| 231094_s_at | 155 | 1001 | 232 | TCTGAACATCACTCACATTTGCCTC | Antisense | 3017 |
| 231094_s_at | 979 | 443 | 253 | CCTCCCTCCAGATAGCAGTGAAGCC | Antisense | 3018 |
| 231094_s_at | 17 | 45 | 341 | ATCTCTGAGAACTTGTTTAGCAACA | Antisense | 3019 |
| 231094_s_at | 438 | 543 | 360 | GCAACAAAGTCCTCAATGCCTTGAA | Antisense | 3020 |
| 231094_s_at | 719 | 247 | 428 | AAGCTGGTGCGAGGGGATGCCCATG | Antisense | 3021 |
| 231094_s_at | 654 | 811 | 440 | GGGGATGCCCATGAATGTTTTGTTT | Antisense | 3022 |
| 231094_s_at | 557 | 469 | 473 | GCCAAAGCTGTAATTGAACTTCTTG | Antisense | 3023 |
| 231094_s_at | 339 | 343 | 551 | CATGGGTCTTTGGAAGCTGCTCTAC | Antisense | 3024 |
| 231094_s_at | 358 | 393 | 567 | CTGCTCTACAATGCCTGTTCCAGAG | Antisense | 3025 |
| 231094_s_at | 882 | 861 | 621 | GGAAAACACGCCAGCTTCAAAGCAA | Antisense | 3026 |
| 231229_at | 843 | 533 | 31 | GCACGTCCAAGGTGATCCTGAGGGC | Antisense | 3027 |
| 231229_at | 969 | 317 | 96 | CACCCTGAAGAAGGCTGTTTCCACC | Antisense | 3028 |
| 231229_at | 999 | 605 | 130 | GACATGGCCCGAAATGCCTATCACT | Antisense | 3029 |
| 231229_at | 632 | 477 | 145 | GCCTATCACTTCAAGCGTGTGCTCA | Antisense | 3030 |
| 231229_at | 105 | 389 | 247 | CTCCAAGTCCAAGCTCAAGGTCAAG | Antisense | 3031 |
| 231229_at | 658 | 603 | 315 | GACAGCACAGGTCACTACTGGGCTC | Antisense | 3032 |
| 231229_at | 453 | 1057 | 330 | TACTGGGCTCCAAACAGGGGCACAA | Antisense | 3033 |
| 231229_at | 908 | 293 | 352 | CAAGCGGCTTATCAAGGGGGTTCGA | Antisense | 3034 |
| 231229_at | 961 | 803 | 369 | GGGTTCGAAGGGTGGCCAAGTGCCA | Antisense | 3035 |
| 231229_at | 847 | 59 | 403 | ATGAGGCAGGCCAGGCAAGCAGTCA | Antisense | 3036 |
| 231229_at | 1130 | 419 | 441 | CGCCATTGGCTCAGTGCAGTGGGAA | Antisense | 3037 |
| 231592_at | 400 | 777 | 257 | GTGTTTTTGTTGCATCTCCAAGTCA | Antisense | 3038 |
| 231592_at | 33 | 851 | 297 | GGAGCAGATATATTTCATTTAGCAT | Antisense | 3039 |
| 231592_at | 112 | 993 | 379 | TCCCACTCTACAACGCATGTCAAAG | Antisense | 3040 |
| 231592_at | 1150 | 1069 | 414 | TAGTTTTTCCTTAGTATCGAACATA | Antisense | 3041 |
| 231592_at | 1131 | 45 | 429 | ATCGAACATATCACAGCTACTCAAT | Antisense | 3042 |
| 231592_at | 375 | 21 | 494 | ATTTGTTCCTGTGTTTCCACCATAA | Antisense | 3043 |
| 231592_at | 773 | 1113 | 578 | TTATTGCTCATATGTCTTCCTGTCT | Antisense | 3044 |
| 231592_at | 802 | 105 | 638 | AGTTGTTACATCTTGAACCATTTAA | Antisense | 3045 |
| 231592_at | 1019 | 213 | 704 | AAACCCTGAGCCCTTTTATCAGTCT | Antisense | 3046 |
| 231592_at | 604 | 1113 | 719 | TTATCAGTCTCCTGGCTTTAAACTA | Antisense | 3047 |
| 231592_at | 1073 | 773 | 757 | GTGATTTGGGGGATTCCTGAAACTA | Antisense | 3048 |
| 231715_s_at | 169 | 295 | 960 | CAATGCAGTTGAGGCCTCCTGTATC | Antisense | 3049 |
| 231715_s_at | 758 | 479 | 973 | GCCTCCTGTATCCGAACACGAGAGC | Antisense | 3050 |
| 231715_s_at | 347 | 229 | 987 | AACACGAGAGCTACAGTCCATGGCC | Antisense | 3051 |
| 231715_s_at | 1125 | 373 | 997 | CTACAGTCCATGGCCGACCAAGAAA | Antisense | 3052 |
| 231715_s_at | 437 | 415 | 1011 | CGACCAAGAAAAGATCTCCCCAGCT | Antisense | 3053 |
| 231715_s_at | 474 | 389 | 1034 | CTGCCCTTAAGAAGACCCTCTTAGA | Antisense | 3054 |
| 231715_s_at | 206 | 187 | 1058 | ACAGAGTGAAGCTGGAATCCCCCAC | Antisense | 3055 |
| 231715_s_at | 136 | 561 | 1149 | GAAGGACTAAGGCAGCATCTGTCCC | Antisense | 3056 |
| 231715_s_at | 312 | 867 | 1282 | GGAAGTTTTCAGGTCCTTGTGATAA | Antisense | 3057 |
| 231715_s_at | 759 | 979 | 1295 | TCCTTGTGATAAAACCTCCTTAAAT | Antisense | 3058 |
| 231715_s_at | 711 | 999 | 1319 | TCTGTTCAGACCAAGCAATGCGAGC | Antisense | 3059 |
| 231890_at | 206 | 355 | 3223 | CATTGTGCCATTCTAGACTTACCTC | Antisense | 3060 |
| 231890_at | 61 | 283 | 3289 | AATAATCTAGCGTCTCTAACCAGTC | Antisense | 3061 |
| 231890_at | 962 | 491 | 3298 | GCGTCTCTAACCAGTCAAACATTTT | Antisense | 3062 |
| 231890_at | 39 | 1121 | 3392 | TTACCTTTAAACCTGCTGCTATGGT | Antisense | 3063 |
| 231890_at | 1140 | 835 | 3519 | GGATTAACATCTTTCTCTTGACACT | Antisense | 3064 |
| 231890_at | 670 | 191 | 3539 | ACACTGAGACTGGGTTCTCCTGGGA | Antisense | 3065 |
| 231890_at | 1152 | 379 | 3608 | CTCTTCTATTTTGCGCTTTTTGTTT | Antisense | 3066 |
| 231890_at | 729 | 361 | 3649 | CTTCTGTTTCTCTACGATGTTTTGA | Antisense | 3067 |
| 231890_at | 700 | 59 | 3680 | ATGAGGCAGTCATGAGAACCCACCA | Antisense | 3068 |
| 231890_at | 412 | 345 | 3690 | CATGAGAACCCACCAGATACAGCTG | Antisense | 3069 |
| 231890_at | 947 | 1051 | 3707 | TACAGCTGCCTGATCCTGAATTTCC | Antisense | 3070 |
| 231929_at | 1064 | 879 | 2289 | GGCTCAAATACCATACCTCAGAAAA | Antisense | 3071 |
| 231929_at | 779 | 587 | 2336 | GAAACAGTCTTTGCAGCTGTGTGAC | Antisense | 3072 |
| 231929_at | 711 | 533 | 2348 | GCAGCTGTGTGACAAGTCACTCTAC | Antisense | 3073 |
| 231929_at | 1117 | 195 | 2359 | ACAAGTCACTCTACTACATACTGAT | Antisense | 3074 |
| 231929_at | 1014 | 165 | 2378 | ACTGATTTGGAGACCTCCGCTAAAT | Antisense | 3075 |
| 231929_at | 912 | 621 | 2389 | GACCTCCGCTAAATAGTTTTATCAC | Antisense | 3076 |
| 231929_at | 855 | 167 | 2412 | ACTGCAGACTAAAATGTGGGACTTG | Antisense | 3077 |
| 231929_at | 472 | 205 | 2606 | AAAGGTTTGTACTGTCTGAGTGCAC | Antisense | 3078 |
| 231929_at | 986 | 753 | 2619 | GTCTGAGTGCACAGCTACTGGAATA | Antisense | 3079 |
| 231929_at | 1101 | 1117 | 2647 | TTAGGGAATCTCAGGAACAAGCATA | Antisense | 3080 |
| 231929_at | 63 | 741 | 2705 | GTAAGTGCAGTTTTTAATTCTGTAT | Antisense | 3081 |
| 232114_at | 603 | 577 | 5119 | GAACTGCAGTGGAATCGTCCAACTA | Antisense | 3082 |
| 232114_at | 1108 | 5 | 5147 | ATTGCCAGTTTTGGTTCTCCTGAAC | Antisense | 3083 |
| 232114_at | 918 | 965 | 5164 | TCCTGAACCTTATGCCACCTTAAGG | Antisense | 3084 |
| 232114_at | 269 | 51 | 5199 | ATCCAGTAGCTGGCTTGAGATTCCA | Antisense | 3085 |
| 232114_at | 462 | 879 | 5210 | GGCTTGAGATTCCAGTGCTCACACT | Antisense | 3086 |
| 232114_at | 907 | 905 | 5240 | TGGTTTCCAGAGAATCTGGCCCCAA | Antisense | 3087 |
| 232114_at | 300 | 555 | 5251 | GAATCTGGCCCCAAAGTCCAGAAGG | Antisense | 3088 |
| 232114_at | 512 | 739 | 5319 | GTAAGTATTTGCTCTTTTGAATTTA | Antisense | 3089 |
| 232114_at | 380 | 779 | 5357 | GTGTCAGTCTTGGTTGTGTATTGCA | Antisense | 3090 |
| 232114_at | 1018 | 725 | 5474 | GTATGTGGTAATTTGCTCCTATTAG | Antisense | 3091 |
| 232114_at | 363 | 23 | 5629 | ATATTTTCCCATGTTCTCTGTTATT | Antisense | 3092 |
| 232204_at | 1065 | 189 | 1804 | ACAGCCTGCAAGCGATATCTGGCAT | Antisense | 3093 |
| 232204_at | 6 | 1081 | 1819 | TATCTGGCATGATTGTTCCTCCTAT | Antisense | 3094 |
| 232204_at | 843 | 701 | 1833 | GTTCCTCCTATGTGAAAGAATTGCC | Antisense | 3095 |
| 232204_at | 146 | 641 | 1898 | GAGAGTAATCTGATACAAGTCCCAG | Antisense | 3096 |
| 232204_at | 370 | 1045 | 1911 | TACAAGTCCCAGAGTGGAACTTTTA | Antisense | 3097 |
| 232204_at | 895 | 223 | 1980 | AACAAACAAAATCACCGACCTTGCA | Antisense | 3098 |
| 232204_at | 397 | 319 | 1992 | CACCGACCTTGCAAATACTGAAATT | Antisense | 3099 |
| 232204_at | 36 | 1161 | 2015 | TTGGAAGAGGGATCTGCAAGTGCAG | Antisense | 3100 |
| 232204_at | 193 | 93 | 2033 | AGTGCAGGGTGTTGGTTAAAGTTGT | Antisense | 3101 |
| 232204_at | 1064 | 515 | 2140 | GCTTAATTCTGCAATCATTTGTCTT | Antisense | 3102 |
| 232204_at | 144 | 1047 | 2175 | TAAAGCTCTATACAAGGGACACTAT | Antisense | 3103 |
| 232618_at | 394 | 127 | 260 | AGAAGGCCGTGACTTTATAACAAAG | Antisense | 3104 |
| 232618_at | 770 | 645 | 290 | GAGTTGGGTGAGCCCAGTGCACTGC | Antisense | 3105 |
| 232618_at | 820 | 335 | 304 | CAGTGCACTGCACACAAGAGTCAAG | Antisense | 3106 |
| 232618_at | 454 | 387 | 358 | CTCCGTCTGGTCAGCAAGCTTTACA | Antisense | 3107 |
| 232618_at | 334 | 499 | 497 | GCTGATCTTGGAAATTCACCTCTTC | Antisense | 3108 |
| 232618_at | 44 | 611 | 576 | GACTATGGAAACATTCTCAACAGGG | Antisense | 3109 |
| 232618_at | 1114 | 1029 | 592 | TCAACAGGGAAACCCTACTAGACTT | Antisense | 3110 |
| 232618_at | 488 | 17 | 711 | ATTTATGGGAATTATCACTGACAGT | Antisense | 3111 |
| 232618_at | 887 | 1081 | 723 | TATCACTGACAGTTTTTGTACACTT | Antisense | 3112 |
| 232618_at | 198 | 777 | 755 | GTGTTAAAGCAGCAACTCCATGTTG | Antisense | 3113 |
| 232618_at | 944 | 543 | 766 | GCAACTCCATGTTGTAAATGCACAA | Antisense | 3114 |
| 233976_at | 677 | 939 | 1736 | TGAGTCTTTTGAACACAGGTATGAA | Antisense | 3115 |
| 233976_at | 225 | 1007 | 1773 | TCTAAACCAATGTTACCCCTACCAT | Antisense | 3116 |
| 233976_at | 757 | 707 | 1784 | GTTACCCCTACCATACAGGTATGTT | Antisense | 3117 |
| 233976_at | 975 | 243 | 1874 | AACCACATTAAATATTCTGTCCATT | Antisense | 3118 |
| 233976_at | 985 | 957 | 1951 | TGCAGCATGCAAGGCAAGATGACAA | Antisense | 3119 |
| 233976_at | 76 | 201 | 2024 | AAATAATTATGACATGCTTTCTGAA | Antisense | 3120 |
| 233976_at | 948 | 261 | 2047 | AAGTGTCCCCAGATAGTTTCATAAA | Antisense | 3121 |
| 233976_at | 127 | 587 | 2093 | GAAAAACCCATAGACATCATGTTCA | Antisense | 3122 |
| 233976_at | 1001 | 935 | 2125 | TGATGACAAGGCATGTTCATAACCC | Antisense | 3123 |
| 233976_at | 725 | 313 | 2168 | CAGCTAAATAACTGCAATACTTTTG | Antisense | 3124 |
| 233976_at | 781 | 647 | 2196 | GAGTTTGGCAGGTTTCGAAGATGTG | Antisense | 3125 |
| 235048_at | 254 | 1021 | 1013 | TCAGTATTTTTATTCGCCTTCTAGA | Antisense | 3126 |
| 235048_at | 746 | 51 | 1045 | ATCCACACATCACCCATTTATATTA | Antisense | 3127 |
| 235048_at | 697 | 879 | 1107 | GGCTTACCTTCTGTCATCAAGTGAT | Antisense | 3128 |
| 235048_at | 142 | 723 | 1133 | GTATCATCCTGGATCGTCATTTCCA | Antisense | 3129 |
| 235048_at | 1087 | 747 | 1148 | GTCATTTCCAAGGAACTAGCCTTTC | Antisense | 3130 |
| 235048_at | 168 | 367 | 1168 | CTTTCTTTTCCTAAGCGTCTGTATG | Antisense | 3131 |
| 235048_at | 946 | 725 | 1188 | GTATGTGTTCTAAAACTTCCAGTAT | Antisense | 3132 |
| 235048_at | 1009 | 403 | 1265 | CTGGAGTACCTATGTTTGTTTTCTT | Antisense | 3133 |
| 235048_at | 358 | 695 | 1341 | GATTGTTTCCTGGTCTGTGTTTTTA | Antisense | 3134 |
| 235048_at | 258 | 1097 | 1372 | TTTCCTTCAGTTTTCCTCATGAAGA | Antisense | 3135 |
| 235048_at | 762 | 37 | 1453 | ATCACATTGGTTGTACTCTGAAGAC | Antisense | 3136 |
| 235092_at | 544 | 449 | 1270 | CCTTTCAAACGTTTACCAGCTAATG | Antisense | 3137 |
| 235092_at | 452 | 593 | 1317 | GAAAGGGGCTGCGAGTGGTAATATA | Antisense | 3138 |
| 235092_at | 1139 | 251 | 1367 | AAGACCTGTAGGCTATGTGTCTTCT | Antisense | 3139 |
| 235092_at | 639 | 605 | 1419 | GACAGGTTGTGTTAGTGAATTTTAA | Antisense | 3140 |
| 235092_at | 597 | 551 | 1544 | GAATAGCACCTGATTAATTAAGAGT | Antisense | 3141 |
| 235092_at | 65 | 593 | 1580 | GAAAGTTTATTAAGGCGTGCATGGC | Antisense | 3142 |
| 235092_at | 61 | 959 | 1597 | TGCATGGCCTTGGGATAACAATGAA | Antisense | 3143 |
| 235092_at | 791 | 949 | 1618 | TGAAACCATTTGTCTACTGGCATCT | Antisense | 3144 |
| 235092_at | 934 | 401 | 1641 | CTGTCTGCTGGTTTCTTGACACCAG | Antisense | 3145 |
| 235092_at | 202 | 1155 | 1732 | TTGTTCTAAGGAATGCAGTCTTTCA | Antisense | 3146 |
| 235092_at | 351 | 959 | 1745 | TGCAGTCTTTCAGTCATTATCTTTT | Antisense | 3147 |
| 235310_at | 224 | 413 | 1348 | CGATCCTTGGAGATCCCGTAATCCC | Antisense | 3148 |
| 235310_at | 524 | 1091 | 1441 | TTTGGAGCCTGATTTCCTACTGACT | Antisense | 3149 |
| 235310_at | 1002 | 1095 | 1453 | TTTCCTACTGACTTCCAATTTAGTG | Antisense | 3150 |
| 235310_at | 251 | 963 | 1476 | TGCTCCCCCAGTATGCTAAATAGAA | Antisense | 3151 |
| 235310_at | 1065 | 283 | 1494 | AATAGAAAGCCCTCTGCAATATATT | Antisense | 3152 |
| 235310_at | 1119 | 689 | 1636 | GATTATTTACTTTCTCTTATCTTTT | Antisense | 3153 |
| 235310_at | 576 | 1113 | 1652 | TTATCTTTTCCTTAGTGTTCCTCAA | Antisense | 3154 |
| 235310_at | 230 | 199 | 1675 | AAATTATATCTATCCTCTAAACCAG | Antisense | 3155 |
| 235310_at | 107 | 89 | 1698 | AGGGATCAGCAAACTATAACCCCCA | Antisense | 3156 |
| 235310_at | 59 | 173 | 1781 | ACTCATTTGTTTACCTACTATCTAT | Antisense | 3157 |
| 235310_at | 1018 | 947 | 1838 | TGACATGGACCATAGGCCCTAAAGA | Antisense | 3158 |
| 235569_at | 411 | 479 | 417 | GCCTCTAGGGTGATGGACCAGCCCC | Antisense | 3159 |
| 235569_at | 401 | 927 | 452 | TTGACTCAACTACAGGGGCCTGGGA | Antisense | 3160 |
| 235569_at | 334 | 269 | 553 | AAGGCCGCCAGGAGTGTTTTACATC | Antisense | 3161 |
| 235569_at | 1104 | 1073 | 622 | TAGGAGCCAGGTGATCAGGCCTCGG | Antisense | 3162 |
| 235569_at | 915 | 49 | 695 | ATGCTCCAGACCCTGGGGCAAGGTA | Antisense | 3163 |
| 235569_at | 147 | 547 | 712 | GCAAGGTAGGCCAGGGGCTTCTGAC | Antisense | 3164 |
| 235569_at | 657 | 879 | 727 | GGCTTCTGACCTGTGCAGGTGAGAG | Antisense | 3165 |
| 235569_at | 645 | 791 | 753 | GGGCCATACCCAGGAAAGACCATTC | Antisense | 3166 |
| 235569_at | 476 | 401 | 787 | CTGTCCCTGTCTCCTTAGAATGGAA | Antisense | 3167 |
| 235569_at | 659 | 135 | 811 | AGCTTTTTGAGGGCAGGTCCTTGTC | Antisense | 3168 |
| 235569_at | 179 | 339 | 824 | CAGGTCCTTGTCTTTGTACGTTCTG | Antisense | 3169 |
| 235885_at | 734 | 203 | 217 | AAATGTATATATATCCTAGTCCCCT | Antisense | 3170 |
| 235885_at | 973 | 423 | 238 | CCCTAACCAAATCCTGACCTATTGG | Antisense | 3171 |
| 235885_at | 521 | 441 | 250 | CCTGACCTATTGGGATACTTATAAA | Antisense | 3172 |
| 235885_at | 457 | 589 | 357 | GAAACTGTATTTGATTGGACTTAAT | Antisense | 3173 |
| 235885_at | 923 | 637 | 463 | GAGACTTACTTTTATGACATTCTAA | Antisense | 3174 |
| 235885_at | 448 | 195 | 547 | ACAACTTCAATAATACCATCACTGA | Antisense | 3175 |
| 235885_at | 392 | 281 | 555 | AATAATACCATCACTGACACTTACC | Antisense | 3176 |
| 235885_at | 1000 | 599 | 570 | GACACTTACCTTTATTAATTAGCTT | Antisense | 3177 |
| 235885_at | 799 | 25 | 657 | ATATGATTACAAAGTTGCACAGCAT | Antisense | 3178 |
| 235885_at | 929 | 699 | 670 | GTTGCACAGCATAACTACTGAGAGG | Antisense | 3179 |
| 235885_at | 947 | 693 | 700 | GATTGATCTGTTTGTAATTACTTGT | Antisense | 3180 |
| 236694_at | 897 | 13 | 39 | ATTAGAGCTATATCATTTTACTCTG | Antisense | 3181 |
| 236694_at | 784 | 15 | 53 | ATTTTACTCTGAATGTCTTAACATA | Antisense | 3182 |
| 236694_at | 763 | 695 | 99 | GATTGGATTGATTTCAGCCTTCTTC | Antisense | 3183 |
| 236694_at | 199 | 695 | 104 | GATTGATTTCAGCCTTCTTCTGGTA | Antisense | 3184 |
| 236694_at | 44 | 1129 | 111 | TTCAGCCTTCTTCTGGTACTTTTTA | Antisense | 3185 |
| 236694_at | 649 | 1079 | 236 | TATGCTGATCTTGTGAGTATTTATT | Antisense | 3186 |
| 236694_at | 662 | 33 | 284 | ATAAAATCTATGTGTGCTTGATAAG | Antisense | 3187 |
| 236694_at | 73 | 195 | 372 | ACAATCTCCTTTCTTTAGTACTTAT | Antisense | 3188 |
| 236694_at | 804 | 1003 | 376 | TCTCCTTTCTTTAGTACTTATGATT | Antisense | 3189 |
| 236694_at | 1152 | 733 | 389 | GTACTTATGATTGGTGTGTGTGACT | Antisense | 3190 |
| 236694_at | 572 | 817 | 401 | GGTGTGTGTGACTTCATCTTATGAA | Antisense | 3191 |
| 236707_at | 1055 | 977 | 444 | TCCAGGGTCTCTACTGTTCTCCTGG | Antisense | 3192 |
| 236707_at | 521 | 365 | 470 | CTTTTCTCATGCTGGCTACTTCAGG | Antisense | 3193 |
| 236707_at | 1043 | 189 | 510 | ACACCTGTAGGTCTCATATTTTCAA | Antisense | 3194 |
| 236707_at | 452 | 841 | 557 | GGATGATATTACCCGTGTCTGTCCC | Antisense | 3195 |
| 236707_at | 600 | 923 | 572 | TGTCTGTCCCTTTTTATCAGGAAAA | Antisense | 3196 |
| 236707_at | 58 | 391 | 606 | CTCCAGAAACTCCCCTATGAGACCG | Antisense | 3197 |
| 236707_at | 273 | 837 | 681 | GGATTTATTGCTTGGGGTTCTGTTA | Antisense | 3198 |
| 236707_at | 762 | 101 | 801 | AGTATATGCACTGTATCACTCCCTC | Antisense | 3199 |
| 236707_at | 464 | 975 | 847 | TCCACTAGACCTCACATCCAGGTAT | Antisense | 3200 |
| 236707_at | 371 | 517 | 874 | GCTTCTATGCACAGAGACTTACCTC | Antisense | 3201 |
| 236707_at | 34 | 1061 | 893 | TACCTCTTACCTATTCAACTTTAAT | Antisense | 3202 |
| 238106_at | 899 | 799 | 187 | GGGACAGACACTTGTCATTGCCAAG | Antisense | 3203 |
| 238106_at | 867 | 219 | 265 | AAAAATAGCACAGTCATTCCTTTGG | Antisense | 3204 |
| 238106_at | 938 | 409 | 285 | TTTGGACTAAGTCAACTCCTAGGCC | Antisense | 3205 |
| 238106_at | 1145 | 479 | 307 | GCCTCCTGAGAGCACTGTAGCTGTG | Antisense | 3206 |
| 238106_at | 706 | 741 | 377 | GTCACAGGGTACTTTCCTATATACC | Antisense | 3207 |
| 238106_at | 1046 | 1083 | 394 | TATATACCAGCGTACACCTCTATCA | Antisense | 3208 |
| 238106_at | 721 | 191 | 466 | ACACTGCCTCATGCACAGATATAGA | Antisense | 3209 |
| 238106_at | 1031 | 365 | 506 | CTTTCTTTCCCCTGCAATGCAGAAA | Antisense | 3210 |
| 238106_at | 1001 | 193 | 546 | ACAACCACACTAAACCAACCAGAAT | Antisense | 3211 |
| 238106_at | 1145 | 831 | 640 | GGTTAATGAGTCCATACTCCTGCCT | Antisense | 3212 |
| 238106_at | 96 | 479 | 661 | GCCTCCAGTCAGAACTGTCCTAAGC | Antisense | 3213 |
| 238693_at | 1056 | 485 | 214 | GCCCTGAAAGCTTTATAGTCCTGGA | Antisense | 3214 |
| 238693_at | 329 | 863 | 323 | GGAACATACACAGATATTTGGCAGA | Antisense | 3215 |
| 238693_at | 1099 | 871 | 342 | GGCAGAAGTCGAGTAAGGAGGGGAA | Antisense | 3216 |
| 238693_at | 956 | 255 | 370 | AAGAGTCCGTGAGTTTCAGTCATTT | Antisense | 3217 |
| 238693_at | 1080 | 715 | 382 | GTTTCAGTCATTTTCACTGCTCTTT | Antisense | 3218 |
| 238693_at | 144 | 925 | 444 | TGTCACTGAAGACATCACAGATACT | Antisense | 3219 |
| 238693_at | 209 | 23 | 469 | ATATTTATCTTTTGGCTTTGTGTAC | Antisense | 3220 |
| 238693_at | 650 | 35 | 660 | ATAAGGCTCATGTTCCAGACCTACG | Antisense | 3221 |
| 238693_at | 727 | 1017 | 667 | TCATGTTCCAGACCTACGATAGCTT | Antisense | 3222 |
| 238693_at | 224 | 685 | 684 | GATAGCTTGTAGTCTATGTTACGTA | Antisense | 3223 |
| 238693_at | 762 | 1077 | 698 | TATGTTACGTATTTCTTTATATCAC | Antisense | 3224 |
| 239146_at | 523 | 933 | 326 | TGATCTCCAAACCCTTATTTTTTCT | Antisense | 3225 |
| 239146_at | 160 | 1147 | 365 | TTCCACTCATGGACGATGCAACCAA | Antisense | 3226 |
| 239146_at | 184 | 545 | 382 | GCAACCAACAGATGCAATCTCTGAG | Antisense | 3227 |
| 239146_at | 1146 | 669 | 409 | GATGAAAATTGGGACCTCTTATTAT | Antisense | 3228 |
| 239146_at | 986 | 943 | 439 | TGACCTAGCTGGACTCAGGAAACCA | Antisense | 3229 |
| 239146_at | 933 | 1109 | 554 | TTTTCTGCTCTGGTGTATAACAAAC | Antisense | 3230 |
| 239146_at | 432 | 303 | 574 | CAAACAGGTCAAAATTTCCCATCTT | Antisense | 3231 |
| 239146_at | 656 | 453 | 592 | CCATCTTTCCTCCTGATAGTAGTTG | Antisense | 3232 |
| 239146_at | 156 | 1149 | 614 | TTGAATCCTACCTTGCATACTTAAT | Antisense | 3233 |
| 239146_at | 500 | 303 | 676 | CAAAACACACCACCATTTCATTAGG | Antisense | 3234 |
| 239146_at | 635 | 1149 | 745 | TTGCTTTTTCTTAACCCACTATATA | Antisense | 3235 |
| 239486_at | 540 | 1043 | 156 | TAAAGTTGGGCAGTAATCTTAATTA | Antisense | 3236 |
| 239486_at | 1024 | 929 | 224 | TGTTTTACAACTAGAACCTGCCCTA | Antisense | 3237 |
| 239486_at | 21 | 1067 | 235 | TAGAACCTGCCCTAAATGTTGAATA | Antisense | 3238 |
| 239486_at | 826 | 273 | 249 | AATGTTGAATATCTTCCTAGCAAGA | Antisense | 3239 |
| 239486_at | 754 | 359 | 261 | CTTCCTAGCAAGAAACAGTCTGTCA | Antisense | 3240 |
| 239486_at | 374 | 335 | 276 | CAGTCTGTCATTTTACTTACACGAT | Antisense | 3241 |
| 239486_at | 1134 | 171 | 290 | ACTTACACGATGTCTAACCAAACCA | Antisense | 3242 |
| 239486_at | 871 | 745 | 301 | GTCTAACCAAACCATAACTTTACAT | Antisense | 3243 |
| 239486_at | 37 | 1053 | 321 | TACATAAACTAGTCGTTTCGGTCAA | Antisense | 3244 |
| 239486_at | 933 | 619 | 467 | GACCCCTGAGTACCATTAATATTCC | Antisense | 3245 |
| 239486_at | 874 | 631 | 543 | GAGCAGCCATTATGAAATCTCACAA | Antisense | 3246 |
| 239499_at | 991 | 763 | 34 | GTGCTGGCTGGGACCGGAAGAACTC | Antisense | 3247 |
| 239499_at | 246 | 157 | 46 | ACCGGAAGAACTCCTGCTTGGTGGA | Antisense | 3248 |
| 239499_at | 775 | 359 | 113 | CTTCCGGCCTGCAGAGAGCCGCAAG | Antisense | 3249 |
| 239499_at | 729 | 567 | 137 | GAAGAGCGCCAAGGGCATGTACTCC | Antisense | 3250 |
| 239499_at | 548 | 1083 | 171 | TATTACTATCCCAACCGGGCAGGCA | Antisense | 3251 |
| 239499_at | 929 | 791 | 241 | GGGCCATGACACCTGATCATTGGAT | Antisense | 3252 |
| 239499_at | 235 | 1031 | 265 | TCAAGAGGGGCACTGCTCTACTCAT | Antisense | 3253 |
| 239499_at | 742 | 381 | 280 | CTCTACTCATGAGCCTGGACAGCTG | Antisense | 3254 |
| 239499_at | 704 | 317 | 370 | CACCTAGGACTGAGGCCGGACCTCA | Antisense | 3255 |
| 239499_at | 120 | 377 | 395 | CTCAGACTTTGACCTTGGCCGAATT | Antisense | 3256 |
| 239499_at | 1008 | 667 | 425 | GATGTGGCCCTGGAGATACCTAGTT | Antisense | 3257 |
| 239726_at | 910 | 113 | 131 | AGAGTCACTACCCGAGTTATTCGCC | Antisense | 3258 |
| 239726_at | 569 | 711 | 146 | GTTATTCGCCGGCGTTTGATTATAA | Antisense | 3259 |
| 239726_at | 310 | 207 | 169 | AAAGGTATCCTGTAGCTGGATCATT | Antisense | 3260 |
| 239726_at | 494 | 837 | 186 | GGATCATTATGTGGCATTGCTCTAC | Antisense | 3261 |
| 239726_at | 263 | 1119 | 213 | TTAGAAACTCCTTCCTTGTGGTTGT | Antisense | 3262 |
| 239726_at | 994 | 1155 | 234 | TTGTAGAAACTCCTTCCTTGTGGTT | Antisense | 3263 |
| 239726_at | 303 | 17 | 300 | ATTTTTTTGCACCCTTGAAAGCTTG | Antisense | 3264 |
| 239726_at | 696 | 525 | 360 | GCATGGTATTCTGTATAGGCCTATT | Antisense | 3265 |
| 239726_at | 557 | 685 | 386 | GATATGTGGCGGTTGTAGTTTTATT | Antisense | 3266 |
| 239726_at | 78 | 751 | 599 | GTCTCAAATTCCTACTGCCTTAAGA | Antisense | 3267 |
| 239726_at | 629 | 243 | 637 | AACCAGTTCTTCATAAGCAATCAGT | Antisense | 3268 |
| 239834_at | 800 | 281 | 15 | AATAACTGCTAAGGTCCTATTTTGA | Antisense | 3269 |
| 239834_at | 940 | 111 | 52 | AGAGGGAGGGATGTTCTTTATTTCT | Antisense | 3270 |
| 239834_at | 273 | 143 | 117 | AGCGATTGTAACAAGACTTCTTGCC | Antisense | 3271 |
| 239834_at | 447 | 609 | 131 | GACTTCTTGCCATGGTTATTTGGAG | Antisense | 3272 |
| 239834_at | 919 | 629 | 153 | GAGCTATTAAGATTAACTGCCTTTT | Antisense | 3273 |
| 239834_at | 172 | 1071 | 209 | TAGTTTGTGGCTACATTCCTTTTTC | Antisense | 3274 |
| 239834_at | 635 | 959 | 249 | TGCTCTCCTTTATGAAAAGTTCAAG | Antisense | 3275 |
| 239834_at | 107 | 341 | 324 | CAGGAAGTAGTTACTGAGCGCCTAC | Antisense | 3276 |
| 239834_at | 400 | 1049 | 376 | TAAATTAATCGTTTTCCACCTGGCA | Antisense | 3277 |
| 239834_at | 736 | 1095 | 388 | TTTCCACCTGGCAAGTAGTCTCATT | Antisense | 3278 |
| 239834_at | 723 | 437 | 394 | CCTGGCAAGTAGTCTCATTGGCAAA | Antisense | 3279 |
| 240013_at | 431 | 357 | 14 | CTTGCGATGCATCTTACTCTGTTTA | Antisense | 3280 |
| 240013_at | 184 | 525 | 52 | GCATGTCTGTTTTTTGACGGCATCT | Antisense | 3281 |
| 240013_at | 1058 | 87 | 150 | AGGGCAATTCCCTTTTCTGATATTG | Antisense | 3282 |
| 240013_at | 438 | 399 | 166 | CTGATATTGCTAGCTGTGTTTCTTG | Antisense | 3283 |
| 240013_at | 648 | 777 | 181 | GTGTTTCTTGGGTTGCCACTATTGC | Antisense | 3284 |
| 240013_at | 178 | 701 | 192 | GTTGCCACTATTGCCACTGAATGAA | Antisense | 3285 |
| 240013_at | 554 | 1133 | 226 | TTCTTCACCTAACCAGGTAATCTGC | Antisense | 3286 |
| 240013_at | 724 | 279 | 244 | AATCTGCAGTTCTCATAATCGCTTT | Antisense | 3287 |
| 240013_at | 605 | 35 | 258 | ATAATCGCTTTGTGCTATTGATGAG | Antisense | 3288 |
| 240013_at | 786 | 529 | 282 | GCAGTCATATGTTTTTCAATGCTAT | Antisense | 3289 |
| 240013_at | 295 | 61 | 337 | ATGATGCTTTCGATTGTTATACTAA | Antisense | 3290 |
| 241671_x_at | 579 | 1 | 28 | ATTCTGAAGCCAGACCGTCTTTCCT | Antisense | 3291 |
| 241671_x_at | 716 | 993 | 223 | TCGCAGCTGGGCGAGGGGACTTGGA | Antisense | 3292 |
| 241671_x_at | 861 | 403 | 229 | CTGGGCGAGGGGACTTGGAGGACAG | Antisense | 3293 |
| 241671_x_at | 555 | 813 | 237 | GGGGACTTGGAGGACAGGGTGAAGC | Antisense | 3294 |
| 241671_x_at | 958 | 177 | 241 | ACTTGGAGGACAGGGTGAAGCTGCA | Antisense | 3295 |
| 241671_x_at | 834 | 951 | 256 | TGAAGCTGCAGAAGACCTGGGGTGG | Antisense | 3296 |
| 241671_x_at | 1116 | 501 | 260 | GCTGCAGAAGACCTGGGGTGGGATG | Antisense | 3297 |
| 241671_x_at | 425 | 1067 | 287 | TAGAGAGGACGCCAAGGACTGGGGA | Antisense | 3298 |
| 241671_x_at | 19 | 113 | 290 | AGAGGACGCCAAGGACTGGGGAAGG | Antisense | 3299 |
| 241671_x_at | 516 | 865 | 315 | GGAAGTTAGGAATACCTTACATCCA | Antisense | 3300 |
| 241671_x_at | 536 | 75 | 322 | AGGAATACCTTACATCCAATGCCCA | Antisense | 3301 |
| 241956_at | 521 | 395 | 54 | CTGCAAAGCAGTATTCCTCAGCCTT | Antisense | 3302 |
| 241956_at | 413 | 835 | 80 | GGTTGGGTCTTTGATATGTGGTGAT | Antisense | 3303 |
| 241956_at | 209 | 775 | 100 | GTGATATCCTGGGTTTCAACTCTTC | Antisense | 3304 |
| 241956_at | 5 | 683 | 156 | GATACAGTTGTTCTGTGATTTGGGA | Antisense | 3305 |
| 241956_at | 757 | 1117 | 259 | TTAGATCTTGACTTAGGCATATACA | Antisense | 3306 |
| 241956_at | 219 | 261 | 309 | AAGTCTACAATGTTATGATGCTACA | Antisense | 3307 |
| 241956_at | 220 | 241 | 356 | AACGCTAGGTTTTATGGAGACTCAT | Antisense | 3308 |
| 241956_at | 464 | 257 | 392 | AAGATTTTCGTCTTACTATTCAAGT | Antisense | 3309 |
| 241956_at | 602 | 55 | 430 | ATGAAGCTTTATAATTGGTGTGCAA | Antisense | 3310 |
| 241956_at | 22 | 215 | 454 | AAACCAGACATAGAACCTGCCCTTC | Antisense | 3311 |
| 241956_at | 767 | 1139 | 476 | TTCTGGACTCTCTGGTCAAGTGAAG | Antisense | 3312 |
| 242469_at | 474 | 837 | 74 | GGATATTGTAAACACACCTCAGGGA | Antisense | 3313 |
| 242469_at | 251 | 327 | 117 | CAGACAAACAGGCCAATCCGGGGGA | Antisense | 3314 |
| 242469_at | 534 | 591 | 156 | GAAAGCTCTACAATGAGGCAGATTT | Antisense | 3315 |
| 242469_at | 479 | 297 | 199 | CAAGTCCTTCAGCTCAAGCTGCAGC | Antisense | 3316 |
| 242469_at | 718 | 517 | 259 | GCTTCCTGGTTCATGACATTACAGC | Antisense | 3317 |
| 242469_at | 383 | 353 | 275 | CATTACAGCATGGATCGTTTTCAAA | Antisense | 3318 |
| 242469_at | 1096 | 225 | 297 | AAAATTAATACTGCCTCCTGTTTCA | Antisense | 3319 |
| 242469_at | 2 | 1057 | 305 | TACTGCCTCCTGTTTCAGCAGTGGC | Antisense | 3320 |
| 242469_at | 1014 | 1003 | 342 | TCTCCCTGTGGCTCAGAGTATGGGA | Antisense | 3321 |
| 242469_at | 406 | 801 | 363 | GGGAGTGAGTATGCCCTGTAACCCA | Antisense | 3322 |
| 242469_at | 633 | 553 | 421 | GAATCACAGAGCAATACGGGTACCT | Antisense | 3323 |
| 242765_at | 31 | 299 | 41 | CAAGACTACACTTTCTTGCCTTCTT | Antisense | 3324 |
| 242765_at | 627 | 153 | 128 | ACCTTGGAACTCTGTTCTTGCTCTT | Antisense | 3325 |
| 242765_at | 49 | 359 | 144 | CTTGCTCTTCATTCCGCATGTGATA | Antisense | 3326 |
| 242765_at | 397 | 1143 | 155 | TTCCGCATGTGATACTCTGGTCCAA | Antisense | 3327 |
| 242765_at | 246 | 285 | 206 | AATATCGTCTCAGAGGTGCTTCCCT | Antisense | 3328 |
| 242765_at | 502 | 111 | 217 | AGAGGTGCTTCCCTTGAAAACTCGG | Antisense | 3329 |
| 242765_at | 698 | 171 | 236 | ACTCGGTGCTGTTTCCATAGTTACT | Antisense | 3330 |
| 242765_at | 61 | 1071 | 253 | TAGTTACTCTATTTGATCACTCTAA | Antisense | 3331 |
| 242765_at | 1147 | 679 | 267 | GATCACTCTAAGTTTGGTTGTCTTC | Antisense | 3332 |
| 242765_at | 53 | 427 | 359 | CCCTCCTAACGTAAACTCCATGATT | Antisense | 3333 |
| 242765_at | 667 | 237 | 372 | AACTCCATGATTGCCAACACCTGTT | Antisense | 3334 |
| 242874_at | 729 | 529 | 35 | GCAGTTCCAGTCTCACAGAAGTCTG | Antisense | 3335 |
| 242874_at | 832 | 561 | 84 | GAAGGTGGTCTTTTCATTCTACTCA | Antisense | 3336 |
| 242874_at | 183 | 1131 | 96 | TTCATTCTACTCAGGTCTTCTATTG | Antisense | 3337 |
| 242874_at | 1090 | 31 | 138 | ATACATCATGGAGGGCAATCTTCTT | Antisense | 3338 |
| 242874_at | 562 | 797 | 150 | GGGCAATCTTCTTTACTCAGAGGAC | Antisense | 3339 |
| 242874_at | 434 | 779 | 179 | GTGTCAATGTTATTCCCATCCAGAA | Antisense | 3340 |
| 242874_at | 57 | 453 | 194 | CCATCCAGAAACACCTTCCAAGTTG | Antisense | 3341 |
| 242874_at | 269 | 1045 | 230 | TAACAATACACTTTTCCTCATCTCA | Antisense | 3342 |
| 242874_at | 217 | 1097 | 242 | TTTCCTCATCTCACCCAAATTTAGG | Antisense | 3343 |
| 242874_at | 676 | 1159 | 301 | TTGGAATGCCACTTTTACTTTTGGA | Antisense | 3344 |
| 242874_at | 1035 | 871 | 372 | GGCACACTGGTTTACACCTATAATC | Antisense | 3345 |
| 243010_at | 200 | 597 | 608 | GAAATACACCCACTCTCTTGGAATA | Antisense | 3346 |
| 243010_at | 1151 | 57 | 633 | ATGACGTACCACTCAGTTGGACCCT | Antisense | 3347 |
| 243010_at | 856 | 619 | 652 | GACCCTCAAGAGTCACTGCTTTGTC | Antisense | 3348 |
| 243010_at | 506 | 417 | 704 | CGCACGCTTCCATTTGATGCATTTG | Antisense | 3349 |
| 243010_at | 1129 | 63 | 753 | ATGTCATTGTCCTTGAGACCCTACA | Antisense | 3350 |
| 243010_at | 296 | 639 | 767 | GAGACCCTACATGTGCAGTTTGGCT | Antisense | 3351 |
| 243010_at | 825 | 1097 | 840 | TTTCCTGCAGGCTTTTCCATGAGTA | Antisense | 3352 |
| 243010_at | 970 | 579 | 879 | GAACAAATCTGTATGGCTTTTCCCC | Antisense | 3353 |
| 243010_at | 483 | 767 | 943 | GTGAACTTGTCCTAGTATGCTTGCC | Antisense | 3354 |
| 243010_at | 1033 | 357 | 962 | CTTGCCTCACAAACGTTTTAGCCAT | Antisense | 3355 |
| 243010_at | 136 | 365 | 1119 | CTTAGCCTGACAGTGTCCTGTTCTC | Antisense | 3356 |
| 243170_at | 255 | 1017 | 52 | TCATATAATATGTTGCTGCTTTTGG | Antisense | 3357 |
| 243170_at | 560 | 811 | 77 | GGGGGTGTTGGGGAGTACCAGAGAG | Antisense | 3358 |
| 243170_at | 56 | 525 | 106 | GCATGCATCTGCAGTGTACACTGGC | Antisense | 3359 |
| 243170_at | 813 | 541 | 129 | GCAAACAAAAGGTTTGTCATTCCCG | Antisense | 3360 |
| 243170_at | 1069 | 839 | 221 | GGATGCAGGTGTAGTCTTGTGCCAG | Antisense | 3361 |
| 243170_at | 57 | 729 | 231 | GTAGTCTTGTGCCAGTCTGTGACAT | Antisense | 3362 |
| 243170_at | 649 | 769 | 249 | GTGACATAACACCTGAACAATTTCT | Antisense | 3363 |
| 243170_at | 1156 | 581 | 263 | GAACAATTTCTATGGTATCCTACCC | Antisense | 3364 |
| 243170_at | 833 | 1079 | 278 | TATCCTACCCATTTGCTCAGATTCA | Antisense | 3365 |
| 243170_at | 1142 | 507 | 292 | GCTCAGATTCAAACCAGGCCTTAAT | Antisense | 3366 |
| 243170_at | 287 | 47 | 304 | ACCAGGCCTTAATCGATAACAAGCA | Antisense | 3367 |
| 244008_at | 1036 | 1053 | 112 | TACATTTCACATTTACCAGCAAGTC | Antisense | 3368 |
| 244008_at | 485 | 285 | 144 | AATAGTGCTTATTTACATAGTCAAT | Antisense | 3369 |
| 244008_at | 163 | 41 | 193 | ATCTTCGATCTGCCCAATATTTAAT | Antisense | 3370 |
| 244008_at | 784 | 685 | 269 | GATATGCCTATGTTTCTTTAACTAT | Antisense | 3371 |
| 244008_at | 58 | 1011 | 283 | TCTTTAACTATACAGCCTCTTTACA | Antisense | 3372 |
| 244008_at | 121 | 721 | 338 | GTATTGCAACCTGCTATTTAGCCTT | Antisense | 3373 |
| 244008_at | 473 | 17 | 353 | ATTTAGCCTTTGGTGCCTTAGAATT | Antisense | 3374 |
| 244008_at | 872 | 1099 | 443 | TTTCTCTATTCACTTTTTATTGCTC | Antisense | 3375 |
| 244008_at | 199 | 7 | 461 | ATTGCTCTTGCTTTCTATTGCTACT | Antisense | 3376 |
| 244008_at | 591 | 509 | 480 | GCTACTAAAGCCTCTTTTATCCAGC | Antisense | 3377 |
| 244008_at | 316 | 739 | 508 | GTAATAGTTCCAACATTGTAGCGAA | Antisense | 3378 |
| 244272_s_at | 469 | 1081 | 49 | TATCATCATATATTTGTCCTCTAGC | Antisense | 3379 |
| 244272_s_at | 903 | 1157 | 62 | TTGTCCTCTAGCATGTATAACACCA | Antisense | 3380 |
| 244272_s_at | 888 | 109 | 87 | AGAGGGGACTCTAATGTAAACCATG | Antisense | 3381 |
| 244272_s_at | 903 | 669 | 128 | GATGTTTCAGAGTAGGTTCATTGAT | Antisense | 3382 |
| 244272_s_at | 282 | 201 | 190 | AAATAATCCTCAGTACAGCCAAGCT | Antisense | 3383 |
| 244272_s_at | 1139 | 733 | 202 | GTACAGCCAAGCTGAGGCTTTACAG | Antisense | 3384 |
| 244272_s_at | 193 | 1153 | 264 | TTGACTATTTGGGACTGCTGCTTTA | Antisense | 3385 |
| 244272_s_at | 126 | 1129 | 324 | TTCACCATAGAAACATCCTCCACAG | Antisense | 3386 |
| 244272_s_at | 94 | 199 | 360 | AAATTCTGTTGCCATTACATTCAAT | Antisense | 3387 |
| 244272_s_at | 1034 | 353 | 377 | CATTCAATTTCCAATATCCAGCAAA | Antisense | 3388 |
| 244272_s_at | 517 | 217 | 408 | AAACTTCCAATCTTAATATTAATCT | Antisense | 3389 |
| 244335_at | 552 | 51 | 22 | ATGCCAGAATTACCAAAAGTCACGA | Antisense | 3390 |
| 244335_at | 13 | 101 | 152 | AGTAGAGATTACCCAGCATTCAGCT | Antisense | 3391 |
| 244335_at | 437 | 325 | 172 | CAGCTCACCATTTGAAACCAGCCAA | Antisense | 3392 |
| 244335_at | 334 | 93 | 256 | AGTGTTACTCAATCTGGAAGTTGCA | Antisense | 3393 |
| 244335_at | 676 | 699 | 275 | GTTGCAATGAGCTTGACAATGTCAA | Antisense | 3394 |
| 244335_at | 257 | 645 | 312 | GAGATTCTCAATGAACCTCTAATGT | Antisense | 3395 |
| 244335_at | 751 | 575 | 324 | GAACCTCTAATGTTTTACCTTCAAT | Antisense | 3396 |
| 244335_at | 536 | 257 | 376 | AAGATTACCCAAATTCTACCATCAT | Antisense | 3397 |
| 244335_at | 167 | 1009 | 390 | TCTACCATCATTTTGCCACTGGGAT | Antisense | 3398 |
| 244335_at | 215 | 841 | 436 | GGATGACCATTATTATTCCTGGACT | Antisense | 3399 |
| 244335_at | 629 | 925 | 465 | TGTACACGATTCTCATAAACCCAAT | Antisense | 3400 |
| 244370_at | 1064 | 965 | 18 | TGCCCCCCTAGGTGCTAATAAAAGG | Antisense | 3401 |
| 244370_at | 807 | 651 | 140 | GAGTGTAGTGATCTTGTGCAAAAAA | Antisense | 3402 |
| 244370_at | 602 | 57 | 166 | ATGAACATTTGTGAGCTTCTTGCTG | Antisense | 3403 |
| 244370_at | 162 | 181 | 170 | ACATTTGTGAGCTTCTTGCTGTTTT | Antisense | 3404 |
| 244370_at | 707 | 943 | 177 | TGAGCTTCTTGCTGTTTTATAGATT | Antisense | 3405 |
| 244370_at | 681 | 1155 | 235 | TTGTTGTTCTTGTTGCGAAGGTTTC | Antisense | 3406 |
| 244370_at | 430 | 703 | 240 | GTTCTTGTTGCGAAGGTTTCAAATA | Antisense | 3407 |
| 244370_at | 133 | 1085 | 263 | TATTTGTGACTGAATGTACGGTGAA | Antisense | 3408 |
| 244370_at | 730 | 613 | 270 | GACTGAATGTACGGTGAAACTGTCA | Antisense | 3409 |
| 244370_at | 574 | 589 | 285 | GAAACTGTCATAATGTTACCTAGCT | Antisense | 3410 |
| 244370_at | 335 | 61 | 297 | ATGTTACCTAGCTGAGTTTTGTTAT | Antisense | 3411 |
| 244393_x_at | 880 | 421 | 132 | CCCAGCCGCTATAACTTTTAACAAT | Antisense | 3412 |
| 244393_x_at | 314 | 197 | 152 | ACAATTCCCATATGTCCTTTATTCC | Antisense | 3413 |
| 244393_x_at | 700 | 1077 | 162 | TATGTCCTTTATTCCACTAAGATGA | Antisense | 3414 |
| 244393_x_at | 464 | 59 | 183 | ATGAGTGCAGTATATATTTCCATCT | Antisense | 3415 |
| 244393_x_at | 489 | 23 | 196 | ATATTTCCATCTGTCCAAGGCTTCC | Antisense | 3416 |
| 244393_x_at | 796 | 795 | 270 | GGGCATTTGGGGAATCCAGGCTGTG | Antisense | 3417 |
| 244393_x_at | 1140 | 455 | 285 | CCAGGCTGTGATTCAGGGAAGTTCC | Antisense | 3418 |
| 244393_x_at | 597 | 257 | 303 | AAGTTCCAAGTGTCTGATGAAGTGT | Antisense | 3419 |
| 244393_x_at | 722 | 1155 | 328 | TTGTTTTACATCTTTGTGTCCCTTG | Antisense | 3420 |
| 244393_x_at | 247 | 453 | 348 | CCTTGCAGGTCTAGCACTGTGCTAT | Antisense | 3421 |
| 244393_x_at | 748 | 765 | 366 | GTGCTATGTAGGTAACATGTGCTCC | Antisense | 3422 |
| 35685_at | 1115 | 659 | 1036 | GAGGAGCCTGCTTTGCCCAGCCTGG | Antisense | 3423 |
| 35685_at | 886 | 79 | 1037 | AGGAGCCTGCTTTGCCCAGCCTGGA | Antisense | 3424 |
| 35685_at | 959 | 99 | 1079 | AGTACACCATCTACATCGCACCTGG | Antisense | 3425 |
| 35685_at | 252 | 191 | 1082 | ACACCATCTACATCGCACCTGGAGG | Antisense | 3426 |
| 35685_at | 199 | 1 | 1161 | ATTCTGGAAGGTGTCCCGGCCACTG | Antisense | 3427 |
| 35685_at | 486 | 463 | 1180 | CCACTGGAGCTGTGCTATGCTCCCA | Antisense | 3428 |
| 35685_at | 607 | 315 | 1181 | CACTGGAGCTGTGCTATGCTCCCAC | Antisense | 3429 |
| 35685_at | 391 | 421 | 1223 | CCCACCAGGGGACAGCCAGAGGAAG | Antisense | 3430 |
| 35685_at | 271 | 621 | 1250 | GACCATGGGGTATCCCTGTGTCCTG | Antisense | 3431 |
| 35685_at | 530 | 1079 | 1260 | TATCCCTGTGTCCTGGTCTATCACC | Antisense | 3432 |
| 35685_at | 607 | 489 | 1313 | GCCCAGCCAGCCAATAAGAGGACAC | Antisense | 3433 |
| 35685_at | 818 | 461 | 1319 | CCAGCCAATAAGAGGACACAAATGA | Antisense | 3434 |
| 35685_at | 1114 | 599 | 1333 | GACACAAATGAGGACACGTGGCTTT | Antisense | 3435 |
| 35685_at | 797 | 315 | 1347 | CACGTGGCTTTTATACAAAGTATCT | Antisense | 3436 |
| 35685_at | 425 | 395 | 1441 | CTGCAACGTCCCATCTATACGAGGT | Antisense | 3437 |
| 35685_at | 726 | 301 | 1444 | CAACGTCCCATCTATACGAGGTGTT | Antisense | 3438 |
| 39582_at | 184 | 891 | 2143 | GGCCACAAATGGAGGGATTGTCCTT | Antisense | 3439 |
| 39582_at | 965 | 759 | 2162 | GTCCTTTCAAGCACCACAGCTTCAG | Antisense | 3440 |
| 39582_at | 162 | 1113 | 2242 | TTATATTGGAGACTCAACTGCCCTT | Antisense | 3441 |
| 39582_at | 704 | 1115 | 2311 | TTAGAAAGTCTTAGCATCAGATCAT | Antisense | 3442 |
| 39582_at | 573 | 593 | 2314 | GAAAGTCTTAGCATCAGATCATAAA | Antisense | 3443 |
| 39582_at | 621 | 419 | 2361 | CCCATCTGAAACTTCCCAGGGGAGT | Antisense | 3444 |
| 39582_at | 880 | 453 | 2362 | CCATCTGAAACTTCCCAGGGGAGTT | Antisense | 3445 |
| 39582_at | 1069 | 1139 | 2373 | TTCCCAGGGGAGTTGGGATTCTTAG | Antisense | 3446 |
| 39582_at | 982 | 991 | 2374 | TCCCAGGGGAGTTGGGATTCTTAGT | Antisense | 3447 |
| 39582_at | 556 | 265 | 2410 | AAGGGGCTCATTTTCTACTGCATTT | Antisense | 3448 |
| 39582_at | 909 | 793 | 2413 | GGGCTCATTTTCTACTGCATTTCCC | Antisense | 3449 |
| 39582_at | 103 | 991 | 2434 | TCCCATTTTTGGTATCTTGTTCAGC | Antisense | 3450 |
| 39582_at | 289 | 425 | 2435 | CCCATTTTTGGTATCTTGTTCAGCA | Antisense | 3451 |
| 39582_at | 550 | 353 | 2437 | CATTTTTGGTATCTTGTTCAGCATG | Antisense | 3452 |

TABLE 16
100 PS probe sequences

| | | | | | | |
|---|---|---|---|---|---|---|
| | | | Probe | | | |
| Probe Set | | | Interrogation | | Target | |
| Name | Probe.X | Probe.Y | Position | Probe.Sequence | Strandedness | SEQ ID NO: |

| | | | | | | |
|---|---|---|---|---|---|---|
| 1555852_at | 9 | 453 | 729 | CCATTCTGAGTACTTCTCCGCAAAC | Antisense | 3453 |
| 1555852_at | 567 | 615 | 770 | GACTGTTTTACATGAAGGGTGCAAA | Antisense | 3454 |
| 1555852_at | 99 | 1 | 811 | GAACCCTAGGGTGAAACACGTGACA | Antisense | 3455 |
| 1555852_at | 208 | 1089 | 849 | TATTGAATAGTCCTCTTCTCTACCC | Antisense | 3456 |
| 1555852_at | 446 | 255 | 926 | AAGAGATGAGCATTCAAGTCAGGCA | Antisense | 3457 |
| 1555852_at | 412 | 955 | 955 | TGAATTTGGGTCAAGGCTGCGCCAC | Antisense | 3458 |
| 1555852_at | 132 | 75 | 968 | AGGCTGCGCCACTCAAAAGCTATAT | Antisense | 3459 |
| 1555852_at | 158 | 25 | 989 | ATATGACCTCTATATGAGCAGCTTA | Antisense | 3460 |
| 1555852_at | 1121 | 1087 | 1012 | TATTCAACCTCTTTTAACCTCCATT | Antisense | 3461 |
| 1555852_at | 341 | 243 | 1027 | AACCTCCATTTTGTCATCTGTAGAA | Antisense | 3462 |
| 1555852_at | 310 | 1049 | 1058 | TAAATGCCTAGCTCAGAAGGATTCC | Antisense | 3463 |
| 1556049_at | 671 | 213 | 2585 | AAACTCCAGGGCTCATTAGTCCTTT | Antisense | 3464 |
| 1556049_at | 873 | 203 | 2626 | AAATGATGGGTATCCGTGTGCCTGG | Antisense | 3465 |
| 1556049_at | 59 | 907 | 2648 | TGGTCCAAGTTTCCTGGTGGTTGAC | Antisense | 3466 |
| 1556049_at | 136 | 1041 | 2688 | TAAGACATGTTCTGCAGAGTTCTCC | Antisense | 3467 |
| 1556049_at | 458 | 741 | 2727 | GTAATATTCCGTTTGTTTTGCTCCT | Antisense | 3468 |
| 1556049_at | 536 | 633 | 2808 | GAGCAACGATCATTTTCCTAGTCAA | Antisense | 3469 |
| 1556049_at | 160 | 521 | 2869 | GCATTAAACTATAAATCCTCCCTCC | Antisense | 3470 |
| 1556049_at | 791 | 57 | 2930 | ATGACAATGCCTACTGGGCTCAGCT | Antisense | 3471 |
| 1556049_at | 314 | 941 | 2966 | TGAGTCTGACTGAGCCTTCTTAGCA | Antisense | 3472 |
| 1556049_at | 769 | 455 | 3060 | CCAGGTATTTTCAGCAGAGGTTCTT | Antisense | 3473 |
| 1556049_at | 276 | 1055 | 3084 | TACTTTTCTGTAATTGAGGCGCAAC | Antisense | 3474 |
| 1561042_at | 939 | 203 | 444 | AAATGCAGATAAAGGCTACCTCTGA | Antisense | 3475 |
| 1561042_at | 950 | 1047 | 453 | TAAAGGCTACCTCTGAATTCTCAAT | Antisense | 3476 |
| 1561042_at | 156 | 207 | 454 | AAAGGCTACCTCTGAATTCTCAATA | Antisense | 3477 |
| 1561042_at | 287 | 75 | 456 | AGGCTACCTCTGAATTCTCAATAGA | Antisense | 3478 |
| 1561042_at | 640 | 549 | 467 | GAATTCTCAATAGATTCATCATGTT | Antisense | 3479 |
| 1561042_at | 390 | 285 | 475 | AATAGATTCATCATGTTTGCTCTTA | Antisense | 3480 |
| 1561042_at | 971 | 691 | 479 | GATTCATCATGTTTGCTCTTAAGTG | Antisense | 3481 |
| 1561042_at | 921 | 1015 | 482 | TCATCATGTTTGCTCTTAAGTGTAG | Antisense | 3482 |
| 1561042_at | 76 | 719 | 489 | GTTTGCTCTTAAGTGTAGCTGTCCA | Antisense | 3483 |
| 1561042_at | 390 | 963 | 492 | TGCTCTTAAGTGTAGCTGTCCACAC | Antisense | 3484 |
| 1561042_at | 902 | 379 | 494 | CTCTTAAGTGTAGCTGTCCACACTG | Antisense | 3485 |
| 1563497_at | 251 | 1063 | 4804 | TACCATAGCAAGTTCTTATCCTTTG | Antisense | 3486 |
| 1563497_at | 173 | 157 | 4861 | ACCTGTCACAGTAATATGCCAATTT | Antisense | 3487 |
| 1563497_at | 943 | 467 | 4878 | GCCAATTTTTGGTGTCGCTTTAGTA | Antisense | 3488 |
| 1563497_at | 834 | 749 | 4965 | GTCTTTCCTCAGTTGTCTCCTAAAA | Antisense | 3489 |
| 1563497_at | 555 | 677 | 5022 | GATCGTCTTGTGCAGCCCTTTAAAA | Antisense | 3490 |
| 1563497_at | 941 | 53 | 5048 | ATGCGTTTTGCATTCATGTCTTTGC | Antisense | 3491 |
| 1563497_at | 920 | 365 | 5088 | CTTTCATTTTGGGAGTGACTGTCAT | Antisense | 3492 |
| 1563497_at | 1079 | 189 | 5141 | ACACCAGGGCCAGATTGCGTGGGTT | Antisense | 3493 |
| 1563497_at | 610 | 965 | 5156 | TGCGTGGGTTCTAGCTAGGGACCTA | Antisense | 3494 |
| 1563497_at | 1053 | 141 | 5182 | AGCTGGTTACTTGATTTCTCTCTGT | Antisense | 3495 |
| 1563497_at | 93 | 1137 | 5197 | TTCTCTCTGTTCCATTTACTATCTG | Antisense | 3496 |
| 200615_s_at | 715 | 795 | 2839 | GGGCAGGACATGCTGTACCAATCCC | Antisense | 3497 |
| 200615_s_at | 356 | 1063 | 2854 | TACCAATCCCTGAAGCTCACTAATG | Antisense | 3498 |
| 200615_s_at | 1122 | 889 | 2891 | TGGCCGAACTACGTATCCAGCCAGG | Antisense | 3499 |
| 200615_s_at | 858 | 305 | 2908 | CAGCCAGGAAACCCCAATTACACGC | Antisense | 3500 |
| 200615_s_at | 511 | 629 | 2948 | GAGCTCCTGAAGTCTCTCAATACAT | Antisense | 3501 |
| 200615_s_at | 1143 | 31 | 2967 | ATACATCTATCAGGTCTACGACAGC | Antisense | 3502 |
| 200615_s_at | 364 | 297 | 3007 | CAAGACTGGTCCAGTACCCTTCAAC | Antisense | 3503 |
| 200615_s_at | 13 | 161 | 3022 | ACCCTTCAACCATGCTGTGATCGGT | Antisense | 3504 |
| 200615_s_at | 1108 | 737 | 3125 | GTAACTAGTCTAACCTGTGCTAACA | Antisense | 3505 |
| 200615_s_at | 468 | 685 | 3168 | GATAGTTTTAGCTTCCTGTGAACAT | Antisense | 3506 |
| 200615_s_at | 108 | 469 | 3276 | GCCAATGGCTGGCTTTTTCTACACC | Antisense | 3507 |
| 200904_at | 733 | 919 | 1987 | TGTGCCTTCATTCATGGGTTAATGG | Antisense | 3508 |
| 200904_at | 842 | 267 | 2015 | AATGGGTTATCACAGGAATGGGACT | Antisense | 3509 |
| 200904_at | 754 | 115 | 2063 | AGAGAACTGAGCTAGCATGCCCAGC | Antisense | 3510 |
| 200904_at | 296 | 421 | 2087 | CCCACAGAGAGCCTCCACTAGAGTG | Antisense | 3511 |
| 200904_at | 877 | 625 | 2095 | GAGCCTCCACTAGAGTGATGCTAAG | Antisense | 3512 |
| 200904_at | 590 | 749 | 2168 | GTCTAGTGTCTAGTGGATCCAGGCC | Antisense | 3513 |
| 200904_at | 756 | 839 | 2182 | GGATCCAGGCCACAGGAGAGAGTGC | Antisense | 3514 |
| 200904_at | 1010 | 237 | 2253 | AACTGTGGAGTCAGTGGCAGCATGC | Antisense | 3515 |
| 200904_at | 421 | 211 | 2292 | AAAGCTTTAGGCACCAGCCTGCAAC | Antisense | 3516 |
| 200904_at | 729 | 415 | 2322 | CGAGCAGCCACGTAGGCTGCACCCA | Antisense | 3517 |
| 200904_at | 806 | 451 | 2506 | CCTTCCCAGGCTGATCTGAGGTAAA | Antisense | 3518 |
| 200905_x_at | 720 | 213 | 1095 | AAAGCCTGAGACAGCTGCCTTGTGT | Antisense | 3519 |
| 200905_x_at | 1116 | 415 | 1121 | CGACTGAGATGCACAGCTGCCTTGT | Antisense | 3520 |
| 200905_x_at | 1111 | 503 | 1136 | GCTGCCTTGTGTGCGACTGAGATGC | Antisense | 3521 |
| 200905_x_at | 757 | 941 | 1153 | TGAGATGCAGGATTTCCTCACGCCT | Antisense | 3522 |
| 200905_x_at | 919 | 65 | 1183 | ATGTGTCTTAGGGGACTCTGGCTTC | Antisense | 3523 |
| 200905_x_at | 504 | 879 | 1202 | GGCTTCTCTTTTTGCAAGGGCCTCT | Antisense | 3524 |
| 200905_x_at | 369 | 999 | 1230 | TCTGTCTGTGTCCCTGTTAGCACAA | Antisense | 3525 |
| 200905_x_at | 608 | 115 | 1266 | AGAGAAACAGTCCACCTCTGTGTCT | Antisense | 3526 |
| 200905_x_at | 1142 | 913 | 1360 | TGGGCAGAGTGCGGCAGCTCATGCC | Antisense | 3527 |
| 200905_x_at | 917 | 771 | 1587 | GTGAGCCAGGATTGTGCGACTGCAC | Antisense | 3528 |
| 200905_x_at | 728 | 809 | 1620 | GGGTGACAGGGTGAAACGCCATCTC | Antisense | 3529 |
| 201009_s_at | 311 | 31 | 1461 | ATACTGAGGTGGATCCCTGCATCCT | Antisense | 3530 |
| 201009_s_at | 1005 | 427 | 1475 | CCCTGCATCCTCAACAACAATGTGC | Antisense | 3531 |
| 201009_s_at | 153 | 571 | 1520 | GAAGCAGCTTTACCTACTTGTTTCT | Antisense | 3532 |
| 201009_s_at | 57 | 365 | 1615 | CTTAGCCTCTGACTTCCTAATGTAG | Antisense | 3533 |
| 201009_s_at | 954 | 843 | 1639 | GGAGGTGGTCAGCAGGCAATCTCCT | Antisense | 3534 |
| 201009_s_at | 280 | 869 | 1653 | GGCAATCTCCTGGGCCTTAAAGGAT | Antisense | 3535 |
| 201009_s_at | 57 | 207 | 1671 | AAAGGATGCGGACTCATCCTCAGCC | Antisense | 3536 |
| 201009_s_at | 352 | 461 | 1694 | CCAGCGCCCATGTTGTGATACAGGG | Antisense | 3537 |
| 201009_s_at | 988 | 585 | 1749 | GAAAAACTCAGGCCCATCCATTTTC | Antisense | 3538 |
| 201009_s_at | 497 | 289 | 1789 | AATTGAGGCCTTTTCGATAGTTTCG | Antisense | 3539 |
| 201009_s_at | 245 | 205 | 1824 | AAATGGCCTCCTGGCGTAAGCTTTT | Antisense | 3540 |
| 201010_s_at | 1118 | 775 | 2116 | GTGTTCTCCTACTGCAAATATTTTC | Antisense | 3541 |
| 201010_s_at | 612 | 829 | 2153 | GGTTTTCTCTTCATGTAAGTCCTTG | Antisense | 3542 |
| 201010_s_at | 776 | 931 | 2196 | TGTTCTTAGCACTTTAATTCCTGTC | Antisense | 3543 |
| 201010_s_at | 968 | 499 | 2259 | GCTGAAACTGGTCTACTGTGTCTCT | Antisense | 3544 |
| 201010_s_at | 909 | 593 | 2373 | GAAAGGGTTGCTGCTGTCAGCCTTG | Antisense | 3545 |
| 201010_s_at | 538 | 301 | 2444 | CAACCCTGTGATCAGAACCTCCAAA | Antisense | 3546 |
| 201010_s_at | 777 | 107 | 2540 | AGATAGGGATATTGGCCCCTCACTG | Antisense | 3547 |
| 201010_s_at | 1097 | 313 | 2587 | CACTCTCAGCCATAGCACTTTGTTC | Antisense | 3548 |
| 201010_s_at | 814 | 175 | 2603 | ACTTTGTTCACTGTCCTGTGTCAGA | Antisense | 3549 |
| 201010_s_at | 668 | 917 | 2619 | TGTGTCAGAGCACTGAGCTCCACCC | Antisense | 3550 |
| 201010_s_at | 799 | 139 | 2634 | AGCTCCACCCTTTTCTGAGAGTTAT | Antisense | 3551 |
| 202544_at | 797 | 719 | 3563 | GTATTCTTACTATGGTTGCCTTTCC | Antisense | 3552 |
| 202544_at | 520 | 1147 | 3578 | TTGCCTTTCCCTATTTGTTCAATAG | Antisense | 3553 |
| 202544_at | 495 | 63 | 3703 | ATGTAGTAATCTTCTAGACCGCTTA | Antisense | 3554 |
| 202544_at | 672 | 119 | 3718 | AGACCGCTTAAAACCAATGCTCCCA | Antisense | 3555 |
| 202544_at | 665 | 291 | 3732 | CAATGCTCCCAAGCTGAATATTCTT | Antisense | 3556 |
| 202544_at | 22 | 645 | 3891 | GAGATCATTAACATGCCAGGGCAGT | Antisense | 3557 |
| 202544_at | 840 | 457 | 3906 | CCAGGGCAGTTCCCACTGATTTAGA | Antisense | 3558 |
| 202544_at | 979 | 229 | 3992 | AACAGTTCTCTGTCATCGTTTAACA | Antisense | 3559 |
| 202544_at | 47 | 195 | 4023 | ACAACTGACACAACTCCTTAAGCTG | Antisense | 3560 |
| 202544_at | 173 | 1041 | 4041 | TAAGCTGTGGTTTCAGTCTCTGCTA | Antisense | 3561 |
| 202544_at | 320 | 751 | 4056 | GTCTCTGCTAGTTCATATTGCATGT | Antisense | 3562 |
| 202546_at | 849 | 675 | 67 | GATCTGGTGCGGAACCTGCAAAGTG | Antisense | 3563 |
| 202546_at | 1110 | 421 | 119 | CCCAGAATGTGGAGCGGATCCTGGC | Antisense | 3564 |
| 202546_at | 90 | 585 | 151 | GAAAACTTGGAACATCTCCGCAACA | Antisense | 3565 |
| 202546_at | 1046 | 579 | 160 | GAACATCTCCGCAACAAGACAGAGG | Antisense | 3566 |
| 202546_at | 503 | 659 | 181 | GAGGATCTGGAAGCCACATCTGAGC | Antisense | 3567 |
| 202546_at | 497 | 245 | 191 | AAGCCACATCTGAGCACTTCAAGAC | Antisense | 3568 |
| 202546_at | 274 | 631 | 202 | GAGCACTTCAAGACGACATCGCAGA | Antisense | 3569 |
| 202546_at | 1001 | 617 | 213 | GACGACATCGCAGAAGGTGGCTCGA | Antisense | 3570 |
| 202546_at | 549 | 265 | 226 | AAGGTGGCTCGAAAATTCTGGTGGA | Antisense | 3571 |
| 202546_at | 152 | 671 | 261 | GATGATTGTCCTTATCTGCGTGATT | Antisense | 3572 |
| 202546_at | 672 | 463 | 320 | CCACTGGTGCCTTCTCTTAAAGTAA | Antisense | 3573 |
| 202828_s_at | 409 | 811 | 2994 | GGGGGCCACAGGGTGGGCTGTGGAG | Antisense | 3574 |
| 202828_s_at | 721 | 915 | 3012 | TGTGGAGCTCTCAGGAAGGGCCCTG | Antisense | 3575 |
| 202828_s_at | 129 | 399 | 3034 | CTGAGGAAGGCACACTTGCTCCTGT | Antisense | 3576 |
| 202828_s_at | 282 | 939 | 3146 | TGAGGGGCTTCACGAGAGGCCACAG | Antisense | 3577 |
| 202828_s_at | 285 | 481 | 3195 | GCCTGCTCACCATCTCAGTGAGGGG | Antisense | 3578 |
| 202828_s_at | 238 | 421 | 3320 | CCCACCCATTGAAGTCTCCTTGGGC | Antisense | 3579 |
| 202828_s_at | 936 | 751 | 3333 | GTCTCCTTGGGCCACCAAAGGTGGT | Antisense | 3580 |
| 202828_s_at | 990 | 893 | 3357 | TGGCCATGGTACCGGGGACTTGGGA | Antisense | 3581 |
| 202828_s_at | 667 | 109 | 3406 | AGAGGAGAGGGATGTCGGGGGGGTG | Antisense | 3582 |
| 202828_s_at | 938 | 593 | 3446 | GAAATGGGGTGAACGGTGCTGGCAG | Antisense | 3583 |
| 202828_s_at | 951 | 763 | 3461 | GTGCTGGCAGTTCGGCTAGATTTCT | Antisense | 3584 |
| 204078_at | 1122 | 233 | 2016 | AACTTAAGATGGACACAGCTGACTG | Antisense | 3585 |
| 204078_at | 339 | 111 | 2022 | AGATGGACACAGCTGACTGGACCCC | Antisense | 3586 |
| 204078_at | 40 | 313 | 2091 | CACTTCTATGTCTCTGGACCACAGG | Antisense | 3587 |
| 204078_at | 125 | 871 | 2137 | GGCAAGTGGGCTGATGGGGTCCGCC | Antisense | 3588 |
| 204078_at | 895 | 751 | 2192 | GTCTCCTGGACAAGGAGTTTCCAGC | Antisense | 3589 |
| 204078_at | 470 | 439 | 2196 | CCTGGACAAGGAGTTTCCAGCTGCT | Antisense | 3590 |
| 204078_at | 460 | 885 | 2221 | GGCTGGAGTCTCAGGCCAAATTGCA | Antisense | 3591 |
| 204078_at | 55 | 73 | 2233 | AGGCCAAATTGCAGAGGGTCCTCCA | Antisense | 3592 |
| 204078_at | 1110 | 337 | 2256 | CAGGGTCCTGAAGAGCACTGGACTA | Antisense | 3593 |
| 204078_at | 1062 | 441 | 2262 | CCTGAAGAGCACTGGACTAAGAGTC | Antisense | 3594 |
| 204078_at | 250 | 173 | 2277 | ACTAAGAGTCTAGTGGTTCCAGGGC | Antisense | 3595 |
| 204116_at | 475 | 1137 | 867 | TTCTGGCTGGAACGGACGATGCCCC | Antisense | 3596 |
| 204116_at | 606 | 821 | 917 | GGATCTTGTTACTGAATACCACGGG | Antisense | 3597 |
| 204116_at | 110 | 817 | 960 | GGTGTGTCTAAGGGACTGGCTGAGA | Antisense | 3598 |
| 204116_at | 902 | 173 | 997 | ACTACAGTGAACGACTCTGCCTCGT | Antisense | 3599 |
| 204116_at | 121 | 613 | 1009 | GACTCTGCCTCGTCAGTGAGATTCC | Antisense | 3600 |
| 204116_at | 998 | 707 | 1111 | GTTACACCCTAAAGCCTGAAACCTG | Antisense | 3601 |
| 204116_at | 845 | 241 | 1136 | AACCCCAATCCTCTGACAGAAGAAC | Antisense | 3602 |
| 204116_at | 309 | 819 | 1166 | GGTCCTGTAGCCCTAAGTGGTACTA | Antisense | 3603 |
| 204116_at | 1123 | 781 | 1182 | GTGGTACTAACTTTCCTTCATTCAA | Antisense | 3604 |
| 204116_at | 877 | 883 | 1242 | GGCTGATTTGGAATTTTGTGCCCCC | Antisense | 3605 |
| 204116_at | 453 | 285 | 1253 | AATTTTGTGCCCCCATGTAAGCACC | Antisense | 3606 |
| 204233_s_at | 172 | 543 | 1157 | GCAAACATCCGGAAGTATCCCACCA | Antisense | 3607 |
| 204233_s_at | 743 | 1079 | 1172 | TATCCCACCAAGAAACAACAGCTCC | Antisense | 3608 |
| 204233_s_at | 950 | 1085 | 1201 | TATTTCCAGTTACTTGCCTGCATTC | Antisense | 3609 |
| 204233_s_at | 431 | 1035 | 1294 | TAATAGGTTTGCCCTTGCATCTCAT | Antisense | 3610 |
| 204233_s_at | 378 | 801 | 1327 | GGGACTGTGGTCCATTGTACAAGCC | Antisense | 3611 |
| 204233_s_at | 60 | 549 | 1367 | GAATTTGGGTACATGGACTACGCCC | Antisense | 3612 |
| 204233_s_at | 307 | 857 | 1381 | GGACTACGCCCAAGCAAGGTTTGAT | Antisense | 3613 |
| 204233_s_at | 803 | 565 | 1426 | GAAGCTTGGGGTGTGACTGTGGGGA | Antisense | 3614 |
| 204233_s_at | 152 | 155 | 1462 | ACCTCATCACTGGACTGCATGGGGA | Antisense | 3615 |
| 204233_s_at | 742 | 789 | 1530 | GTGGCAGGAGGCTTTGGGTGGCTCA | Antisense | 3616 |
| 204233_s_at | 936 | 1091 | 1542 | TTTGGGTGGCTCACTACTGAACACA | Antisense | 3617 |
| 204266_s_at | 680 | 927 | 1821 | TGTAGATGGCGACTGTGTTATAGAC | Antisense | 3618 |
| 204266_s_at | 802 | 927 | 1836 | TGTTATAGACGGTGCTCACTCCCAA | Antisense | 3619 |
| 204266_s_at | 227 | 669 | 1880 | GATGTACTGCAAAGTCGCCAGTCAC | Antisense | 3620 |
| 204266_s_at | 929 | 471 | 1896 | GCCAGTCACTGCGTGCAAGGTGGCC | Antisense | 3621 |
| 204266_s_at | 276 | 133 | 1980 | AGCAGCTGGATTGCTCTGGAGCAGC | Antisense | 3622 |
| 204266_s_at | 395 | 919 | 2116 | TGTGCAGACAGCCATGCGTGGCCAC | Antisense | 3623 |
| 204266_s_at | 56 | 971 | 2232 | TGCCTGGAGTGTCGGATCCTGTGAG | Antisense | 3624 |
| 204266_s_at | 63 | 653 | 2238 | GAGTGTCGGATCCTGTGAGTAGGCT | Antisense | 3625 |
| 204266_s_at | 121 | 429 | 2323 | CCCTGACATCATCATTCTTGTGGGA | Antisense | 3626 |
| 204266_s_at | 918 | 801 | 2344 | GGGAGACAGCAGCCTGTATGTGGTG | Antisense | 3627 |
| 204266_s_at | 372 | 783 | 2366 | GTGTGGGGCGTGGATCGAGTGTAGC | Antisense | 3628 |
| 204410_at | 165 | 449 | 849 | CCTTTCCTACTGTGATAACGTCAAG | Antisense | 3629 |
| 204410_at | 114 | 553 | 888 | GAATACATTTCTGCCTGATAATCAT | Antisense | 3630 |
| 204410_at | 551 | 971 | 899 | TGCCTGATAATCATGCTGAGTTCTA | Antisense | 3631 |
| 204410_at | 537 | 941 | 915 | TGAGTTCTAATAAGCCCTACTTCCA | Antisense | 3632 |
| 204410_at | 443 | 373 | 931 | CTACTTCCACCTAATCTGTTTACAG | Antisense | 3633 |
| 204410_at | 865 | 715 | 967 | GTTTCAGTTACTTAGATGGTCTCAT | Antisense | 3634 |
| 204410_at | 346 | 667 | 981 | GATGGTCTCATAAGGTTTCTGATAC | Antisense | 3635 |
| 204410_at | 835 | 1017 | 1115 | TCATCCTTTGTGCCTCGGTTATTAA | Antisense | 3636 |
| 204410_at | 807 | 561 | 1223 | GAAACCGAACAATAAGTGGCAACCA | Antisense | 3637 |
| 204410_at | 95 | 859 | 1262 | GGAAATACTGGGGTGCCATTTTGTT | Antisense | 3638 |
| 204410_at | 463 | 1155 | 1302 | TTGTAATCCACTGTTTTGGCTTTCA | Antisense | 3639 |
| 204806_x_at | 716 | 329 | 620 | CAGATCCTCCAAAGGCACACGTTGC | Antisense | 3640 |
| 204806_x_at | 920 | 1007 | 698 | TCTACCCTGCGGAGATCACGCTGAC | Antisense | 3641 |
| 204806_x_at | 353 | 863 | 741 | GGAACAGACCCAGGACACAGAGCTT | Antisense | 3642 |
| 204806_x_at | 319 | 329 | 758 | CAGAGCTTGTGGAGACCAGGCCTGC | Antisense | 3643 |
| 204806_x_at | 622 | 73 | 775 | AGGCCTGCAGGGGATGGAACCTTCC | Antisense | 3644 |
| 204806_x_at | 575 | 323 | 877 | CAGCCCCTCATCCTGAGATGGGAGC | Antisense | 3645 |
| 204806_x_at | 693 | 929 | 948 | TGTTGTCCTTGGAGCTGTGGTCACT | Antisense | 3646 |
| 204806_x_at | 909 | 403 | 977 | CTGTGGTCGCTGCTGTGATGTGGAG | Antisense | 3647 |
| 204806_x_at | 992 | 381 | 1035 | CTCTCAGGCTGCAGTCACTGACAGT | Antisense | 3648 |
| 204806_x_at | 406 | 315 | 1050 | CACTGACAGTGCCCAGGGCTCTGGG | Antisense | 3649 |
| 204806_x_at | 68 | 773 | 1098 | GTGAGACAGCTTCCTTGTGTGGGAC | Antisense | 3650 |
| 204897_at | 294 | 133 | 3030 | AGCAGCTTATTGTTTCTCTGAAAGT | Antisense | 3651 |
| 204897_at | 401 | 71 | 3112 | ATGGCAAGTTGCATCAGAAAGCTTT | Antisense | 3652 |
| 204897_at | 1120 | 685 | 3154 | GATTCCCAAACGTGGTTACATTAGC | Antisense | 3653 |
| 204897_at | 736 | 239 | 3162 | AACGTGGTTACATTAGCCATTCATG | Antisense | 3654 |
| 204897_at | 267 | 475 | 3177 | GCCATTCATGTATGTCAGAAGTGCA | Antisense | 3655 |
| 204897_at | 1002 | 909 | 3206 | TGGGGCACTTAATGGTCACCTTGTA | Antisense | 3656 |
| 204897_at | 560 | 735 | 3228 | GTAACAGTTTTGTGTAACTCCCAGT | Antisense | 3657 |
| 204897_at | 102 | 739 | 3241 | GTAACTCCCAGTGATGCTGTACACA | Antisense | 3658 |
| 204897_at | 629 | 499 | 3256 | GCTGTACACATATTTGAAGGGTCTT | Antisense | 3659 |
| 204897_at | 692 | 777 | 3315 | GTGTTTTTGTGAATTGCTTGGTTGT | Antisense | 3660 |
| 204897_at | 1018 | 197 | 3344 | AAATTCTGAGCCTGATATTGATATG | Antisense | 3661 |
| 205027_s_at | 290 | 15 | 2203 | ATTATATAACTCTTTGAGCCTTTAT | Antisense | 3662 |
| 205027_s_at | 997 | 625 | 2218 | GAGCCTTTATTGGTAAATTCTGGTA | Antisense | 3663 |
| 205027_s_at | 81 | 287 | 2260 | AATTTGGGTGACTAGAACAACTTGA | Antisense | 3664 |
| 205027_s_at | 652 | 729 | 2290 | GTAGCAATAAGCTGGACTAGTGTCC | Antisense | 3665 |
| 205027_s_at | 158 | 779 | 2309 | GTGTCCTAAAAATGGCTAACTGATG | Antisense | 3666 |
| 205027_s_at | 956 | 769 | 2364 | GTGACAGTTTCTTTTGTGTTCCTAT | Antisense | 3667 |
| 205027_s_at | 91 | 703 | 2381 | GTTCCTATGGAAACATTTTATACTG | Antisense | 3668 |
| 205027_s_at | 38 | 917 | 2599 | TGTGTATGTTTTATATCAAATGCCT | Antisense | 3669 |
| 205027_s_at | 22 | 1031 | 2614 | TCAAATGCCTTCATGAATCTTTCAT | Antisense | 3670 |
| 205027_s_at | 667 | 215 | 2712 | AAACCCAATACTTTTGTCCAATGTG | Antisense | 3671 |
| 205027_s_at | 1156 | 175 | 2721 | ACTTTTGTCCAATGTGGTTGGTCAA | Antisense | 3672 |
| 205204_at | 363 | 109 | 167 | AGATCCGAGTGCACTCGCGAGGCAA | Antisense | 3673 |
| 205204_at | 229 | 463 | 200 | CCACCGGTCACTTCATGGGCAAGAA | Antisense | 3674 |
| 205204_at | 297 | 801 | 281 | GGGACCAGCGACTGCAGCTGAGTCA | Antisense | 3675 |
| 205204_at | 580 | 649 | 300 | GAGTCATGATCTGCTCGGAATCCTC | Antisense | 3676 |
| 205204_at | 324 | 963 | 311 | TGCTCGGAATCCTCCTGCTAAAGAA | Antisense | 3677 |
| 205204_at | 608 | 535 | 364 | GCACCCCAAATCCAGTACAGGAGGC | Antisense | 3678 |
| 205204_at | 882 | 1073 | 424 | TAGGGGCAGACACAACAGCGTGGCT | Antisense | 3679 |
| 205204_at | 829 | 141 | 440 | AGCGTGGCTTAGATTGTGCCCACCC | Antisense | 3680 |
| 205204_at | 311 | 763 | 455 | GTGCCCACCCAGGGAAGGTGCTGAA | Antisense | 3681 |
| 205204_at | 1159 | 951 | 476 | TGAATGGGACCCTGTTGATGGCCCC | Antisense | 3682 |
| 205204_at | 541 | 279 | 525 | AATCTCTGTTACTCCATTACTGTGA | Antisense | 3683 |
| 205273_s_at | 536 | 883 | 1991 | GGCTGTCGACTGGGCTAAGTCTGGA | Antisense | 3684 |
| 205273_s_at | 369 | 993 | 2035 | TCGACGAAGCCAAACTTTCTGTCTT | Antisense | 3685 |
| 205273_s_at | 329 | 1139 | 2051 | TTCTGTCTTCTCAACCGTAGATGCT | Antisense | 3686 |
| 205273_s_at | 525 | 985 | 2075 | TCCTGTCGCTCCTTCAGACAAAGGA | Antisense | 3687 |
| 205273_s_at | 190 | 265 | 2095 | AAGGAATGGACCACTTCTTGTACGG | Antisense | 3688 |
| 205273_s_at | 422 | 1013 | 2110 | TCTTGTACGGCCTCTCGGATGAGAT | Antisense | 3689 |
| 205273_s_at | 788 | 363 | 2159 | CTTTGCTGTCAGCCACGACAAGCTC | Antisense | 3690 |
| 205273_s_at | 632 | 539 | 2314 | GCACAGGAGCCCGAGACAATACACC | Antisense | 3691 |
| 205273_s_at | 984 | 923 | 2392 | TGTCATTGAGTGTCGCCAAAGCCCT | Antisense | 3692 |
| 205273_s_at | 1050 | 467 | 2406 | GCCAAAGCCCTTGACTGGCGAGTCA | Antisense | 3693 |
| 205273_s_at | 590 | 1109 | 2516 | TTTTCACTTTGTACTGGCAGGCTCG | Antisense | 3694 |
| 205419_at | 665 | 323 | 1055 | CAGCCCCTGAAGAAAATTCACGTGA | Antisense | 3695 |
| 205419_at | 139 | 671 | 1095 | GATGATGATACATTCCAAGTCTTCA | Antisense | 3696 |
| 205419_at | 477 | 599 | 1171 | GACAAACTTTGCAGGACTTCCCTTA | Antisense | 3697 |
| 205419_at | 288 | 525 | 1181 | GCAGGACTTCCCTTATAAAGCAAAA | Antisense | 3698 |
| 205419_at | 1029 | 705 | 1211 | GTTCAGCTTCCAATTAGTATTCTTT | Antisense | 3699 |
| 205419_at | 465 | 1085 | 1236 | TATATTTCTTTCATTGGGCGCTTTC | Antisense | 3700 |
| 205419_at | 228 | 365 | 1256 | CTTTCCCATCTCCAACTCGGAAGTA | Antisense | 3701 |
| 205419_at | 104 | 565 | 1275 | GAAGTAAGCCCAAGAGAACAACATA | Antisense | 3702 |
| 205419_at | 952 | 551 | 1361 | GAATACACCAAAAGGAGGCGCTCTT | Antisense | 3703 |
| 205419_at | 451 | 1 | 1526 | AAATCCAAATTTCTCTCAATGTTAG | Antisense | 3704 |
| 205419_at | 469 | 649 | 1550 | GATTTAATTCCCTCAATAACACCAA | Antisense | 3705 |
| 205696_s_at | 858 | 1143 | 2023 | TTCCTGTTCTCTTGTATAGCTGAAA | Antisense | 3706 |
| 205696_s_at | 927 | 703 | 2028 | GTTCTCTTGTATAGCTGAAATTCCA | Antisense | 3707 |
| 205696_s_at | 669 | 597 | 2044 | GAAATTCCAGTTTAGGAGCTCAGTT | Antisense | 3708 |
| 205696_s_at | 1014 | 635 | 2069 | GAGAAACAGTTCCATTCAACTGGAA | Antisense | 3709 |
| 205696_s_at | 17 | 951 | 2146 | TGAAAAACCTGATGCAGTGCTCCAT | Antisense | 3710 |
| 205696_s_at | 491 | 799 | 2209 | GGGACAGTTTGTAACTTGGGCTGTA | Antisense | 3711 |
| 205696_s_at | 666 | 1041 | 2344 | TAACTCCCATATCTCCTTTAATGAC | Antisense | 3712 |
| 205696_s_at | 299 | 425 | 2349 | CCCATATCTCCTTTAATGACATTGA | Antisense | 3713 |
| 205696_s_at | 247 | 5 | 2401 | ATTGATGCCAAGCTTTTTTGCCACA | Antisense | 3714 |
| 205696_s_at | 68 | 937 | 2403 | TGATGCCAAGCTTTTTTGCCACAAA | Antisense | 3715 |
| 205696_s_at | 1048 | 793 | 2447 | GGGCTTTGTGGAAACAGCTGGTACT | Antisense | 3716 |
| 205890_s_at | 632 | 625 | 195 | GATCTTAAAGCCACGGAGAAGCCTC | Antisense | 3717 |
| 205890_s_at | 247 | 969 | 293 | TGCCCTTGTTTCTTGTGGAGTCAGG | Antisense | 3718 |
| 205890_s_at | 584 | 59 | 320 | ATGAGGCAAAGAGGCACCTCCTCCA | Antisense | 3719 |
| 205890_s_at | 578 | 561 | 350 | GAAGGTCCAGCTCAGTGGCACAAGT | Antisense | 3720 |
| 205890_s_at | 767 | 615 | 396 | GACGGGTATAATCCCTGAGACCCAG | Antisense | 3721 |
| 205890_s_at | 615 | 619 | 414 | GACCCAGATTGTGACTTGCAATGGA | Antisense | 3722 |
| 205890_s_at | 783 | 113 | 481 | AGAAAGGGCAACTTACTCTTCCTGG | Antisense | 3723 |
| 205890_s_at | 67 | 173 | 495 | ACTCTTCCTGGCATCTTATTGTATT | Antisense | 3724 |
| 205890_s_at | 814 | 279 | 578 | AATCTCTTACTCAACGAACACATCT | Antisense | 3725 |
| 205890_s_at | 573 | 349 | 598 | CATCTTCTGATGATTTCCCAAAATT | Antisense | 3726 |
| 205890_s_at | 415 | 7 | 678 | ATTGCCCAACTCTATGTTTCTTTGA | Antisense | 3727 |
| 206035_at | 580 | 271 | 1973 | AATGGATTGATTCCTGCCTTTATTC | Antisense | 3728 |
| 206035_at | 531 | 1109 | 2025 | TTTTCTTCACACATCGAATACCCAA | Antisense | 3729 |
| 206035_at | 826 | 1001 | 2068 | TCTGCGTTCTTGTCCAAATTCTGCT | Antisense | 3730 |
| 206035_at | 206 | 291 | 2084 | AATTCTGCTTCATAGTAGCCGTCTC | Antisense | 3731 |
| 206035_at | 672 | 1005 | 2105 | TCTCTGCAGTCTTTTCCAACTAAAT | Antisense | 3732 |
| 206035_at | 458 | 173 | 2165 | ACTAATGTAATTCTCACTTTTCCTT | Antisense | 3733 |
| 206035_at | 354 | 365 | 2181 | CTTTTCCTTTTCCATAATAGTTCAT | Antisense | 3734 |
| 206035_at | 289 | 265 | 2217 | AAGGGTATGTTCGGTTGTTGTCTGT | Antisense | 3735 |
| 206035_at | 145 | 1093 | 2284 | TTTGTATCTAAAACGCATTCCCCTC | Antisense | 3736 |
| 206035_at | 1154 | 911 | 2313 | TGGGTTGTTCAATTATCTCTATATA | Antisense | 3737 |
| 206035_at | 1020 | 1051 | 2334 | TATACGGGTTATACGCACCGGAGGC | Antisense | 3738 |
| 207397_s_at | 907 | 667 | 883 | GATGTGGCTCTAAATCAGCCGGACA | Antisense | 3739 |
| 207397_s_at | 1061 | 437 | 901 | CCGGACATGTGCGTCTACCGAAGAG | Antisense | 3740 |
| 207397_s_at | 851 | 761 | 909 | GTGCGTCTACCGAAGAGGGAGGAAG | Antisense | 3741 |
| 207397_s_at | 484 | 115 | 935 | AGAGAGTGCCTTACACCAAACTGCA | Antisense | 3742 |
| 207397_s_at | 363 | 303 | 951 | CAAACTGCAGCTTAAAGAACTGGAG | Antisense | 3743 |
| 207397_s_at | 501 | 577 | 967 | GAACTGGAGAACGAGTATGCCATTA | Antisense | 3744 |
| 207397_s_at | 1075 | 995 | 1027 | TCGGCTGCTACGAACCTATCTGAGA | Antisense | 3745 |
| 207397_s_at | 217 | 963 | 1032 | TGCTACGAACCTATCTGAGAGACAA | Antisense | 3746 |
| 207397_s_at | 396 | 641 | 1048 | GAGAGACAAGTGACCATTTGGTTTC | Antisense | 3747 |
| 207397_s_at | 339 | 195 | 1091 | ACAAGAAAATTGTCTCCAAGCTCAA | Antisense | 3748 |
| 207397_s_at | 662 | 753 | 1102 | GTCTCCAAGCTCAAAGATACTGTCT | Antisense | 3749 |
| 207651_at | 757 | 1147 | 828 | TTGCCTTGTAATTCGACAGCTCTAC | Antisense | 3750 |
| 207651_at | 1133 | 175 | 906 | ACTTTTAGTGACCACGGGCTACATC | Antisense | 3751 |
| 207651_at | 103 | 795 | 921 | GGGCTACATCATATGCTTTGTTCCT | Antisense | 3752 |
| 207651_at | 23 | 31 | 968 | ATACCCTCAGCCAGACAGAAGTCAT | Antisense | 3753 |
| 207651_at | 997 | 563 | 985 | GAAGTCATAACTGATTGCTCAACCA | Antisense | 3754 |
| 207651_at | 1084 | 961 | 1000 | TGCTCAACCAGGATTTCACTCTTCA | Antisense | 3755 |
| 207651_at | 572 | 245 | 1025 | AAGCCAAAGAGGCTACACTGCTCCT | Antisense | 3756 |
| 207651_at | 1026 | 961 | 1066 | TGCTTTGATCCTATCCTGTACTATC | Antisense | 3757 |
| 207651_at | 257 | 211 | 1099 | AAAGCATTCCGCTCAAAGGTCACTG | Antisense | 3758 |
| 207651_at | 1005 | 1027 | 1118 | TCACTGAGACTTTTGCCTCACCTAA | Antisense | 3759 |
| 207651_at | 800 | 959 | 1208 | TGCTACCAATTCTGGCCTTACTGGA | Antisense | 3760 |
| 208296_x_at | 1080 | 1151 | 1417 | TTGAGTTCTCCTTTTAAGTACCAAT | Antisense | 3761 |
| 208296_x_at | 428 | 811 | 1469 | GGTGTGTCATTGCCTTGAAATGCTT | Antisense | 3762 |
| 208296_x_at | 537 | 595 | 1485 | GAAATGCTTGCTTAGGGCTTCTTTT | Antisense | 3763 |
| 208296_x_at | 564 | 1073 | 1497 | TAGGGCTTCTTTTATGTTATCTTAA | Antisense | 3764 |
| 208296_x_at | 1109 | 261 | 1523 | AAGTGCTGGTGAATTTTCCATTTTT | Antisense | 3765 |
| 208296_x_at | 683 | 1145 | 1538 | TTCCATTTTTTACATCCATTTCACA | Antisense | 3766 |
| 208296_x_at | 857 | 593 | 1627 | GAAAGGTAACAATCTTCATTCTACA | Antisense | 3767 |
| 208296_x_at | 713 | 275 | 1727 | AATGCGTGCGTTTCAGTGTTTAAGA | Antisense | 3768 |
| 208296_x_at | 1046 | 297 | 1843 | CAAGCAGTTTGTGTGGTGTTTCTAT | Antisense | 3769 |
| 208296_x_at | 1051 | 201 | 1928 | AAATCTGCTGGCCAGCTATGTCCTC | Antisense | 3770 |
| 208296_x_at | 1016 | 1071 | 1953 | TAGGAAATGACAGACCCAACCACCA | Antisense | 3771 |
| 208478_s_at | 18 | 89 | 95 | AGGGTTTCATCCAGGATCGAGCAGG | Antisense | 3772 |
| 208478_s_at | 361 | 1101 | 99 | TTTCATCCAGGATCGAGCAGGGCGA | Antisense | 3773 |
| 208478_s_at | 292 | 839 | 108 | GGATCGAGCAGGGCGAATGGGGGGG | Antisense | 3774 |
| 208478_s_at | 888 | 527 | 115 | GCAGGGCGAATGGGGGGGGAGGCAC | Antisense | 3775 |
| 208478_s_at | 717 | 447 | 163 | CCTCAGGATGCGTCCACCAAGAAGC | Antisense | 3776 |
| 208478_s_at | 664 | 967 | 171 | TGCGTCCACCAAGAAGCTGAGCGAG | Antisense | 3777 |
| 208478_s_at | 507 | 501 | 186 | GCTGAGCGAGTGTCTCAAGCGCATC | Antisense | 3778 |
| 208478_s_at | 709 | 741 | 197 | GTCTCAAGCGCATCGGGGACGAACT | Antisense | 3779 |
| 208478_s_at | 145 | 489 | 204 | GCGCATCGGGGACGAACTGGACAGT | Antisense | 3780 |
| 208478_s_at | 852 | 577 | 217 | GAACTGGACAGTAACATGGAGCTGC | Antisense | 3781 |
| 208478_s_at | 556 | 333 | 225 | CAGTAACATGGAGCTGCAGAGGATG | Antisense | 3782 |
| 208799_at | 1121 | 407 | 511 | CTGGCCTCTACTACGTGGACAGTGA | Antisense | 3783 |
| 208799_at | 55 | 1075 | 568 | TAGGTTCTGGCTCTGTGTATGCATA | Antisense | 3784 |
| 208799_at | 509 | 903 | 601 | TGGATCGGGGCTATTCCTATGACCT | Antisense | 3785 |
| 208799_at | 757 | 849 | 632 | GGAGCAGGCCTATGATCTGGCCCGT | Antisense | 3786 |
| 208799_at | 857 | 81 | 695 | AGGAGGTGCAGTCAACCTCTACCAC | Antisense | 3787 |
| 208799_at | 941 | 843 | 725 | GGAGGATGGCTGGATCCGAGTCTCC | Antisense | 3788 |
| 208799_at | 569 | 941 | 773 | TGAGAAGTATAGTGGCTCTACCCCC | Antisense | 3789 |
| 208799_at | 649 | 777 | 823 | GTGTTTCTTGGGGTGACTGTCATTG | Antisense | 3790 |
| 208799_at | 694 | 1033 | 849 | TAATACGGACACAGTGACCCATCCT | Antisense | 3791 |
| 208799_at | 69 | 563 | 891 | GAAGGGCCTTCAATTGTATCAGTAC | Antisense | 3792 |
| 208799_at | 511 | 1041 | 923 | TAAGCTCTGGCACATTGACCTCTAT | Antisense | 3793 |
| 208885_at | 165 | 565 | 2602 | GAAGTAAGCCTCATCATCAGAGCCT | Antisense | 3794 |
| 208885_at | 314 | 37 | 2617 | ATCAGAGCCTTTCCTCAAAACTGGA | Antisense | 3795 |
| 208885_at | 1091 | 843 | 2639 | GGAGTCCCAAATGTCATCAGGTTTT | Antisense | 3796 |
| 208885_at | 551 | 159 | 2685 | ACCCCTCTGCTTTTAACTCTAGAAT | Antisense | 3797 |
| 208885_at | 103 | 447 | 2748 | CCTCTAGAGCCTTCAGCCTTAATGG | Antisense | 3798 |
| 208885_at | 864 | 281 | 2806 | AATCAAGCCACTCGGCAGGCATGGA | Antisense | 3799 |
| 208885_at | 289 | 1041 | 2839 | TAAGCATCCTTAGGGTTCTGCCTCT | Antisense | 3800 |
| 208885_at | 979 | 389 | 2862 | CTCCAGGCATTAGCCCTCACATTAG | Antisense | 3801 |
| 208885_at | 345 | 1091 | 2923 | TTTGGAGGCAATCCTACCTTGCTTT | Antisense | 3802 |
| 208885_at | 952 | 919 | 3057 | TGTGCCAATCAATAGCACCCCTACT | Antisense | 3803 |
| 208885_at | 472 | 193 | 3091 | ACACACCTAGCCAGCTGTCAAGGGC | Antisense | 3804 |
| 209140_x_at | 320 | 621 | 816 | GACCTGGCAGCGGGATGGCGAGGAC | Antisense | 3805 |
| 209140_x_at | 595 | 433 | 1017 | CCCCATCGTGGGCATTGTTGCTGGC | Antisense | 3806 |
| 209140_x_at | 268 | 885 | 1044 | GGCTGTCCTAGCAGTTGTGGTCATC | Antisense | 3807 |
| 209140_x_at | 907 | 403 | 1073 | CTGTGGTCGCTGCTGTGATGTGTAG | Antisense | 3808 |
| 209140_x_at | 786 | 491 | 1148 | GCGACAGTGCCCAGGGCTCTGATGT | Antisense | 3809 |
| 209140_x_at | 667 | 637 | 1196 | GAGACAGCTGTCTTGTGAGGGACTG | Antisense | 3810 |
| 209140_x_at | 954 | 643 | 1220 | GAGATGCAGGATTTCTTCACGCCTC | Antisense | 3811 |
| 209140_x_at | 233 | 769 | 1251 | GTGACTTCAAGAGCCTCTGGCATCT | Antisense | 3812 |
| 209140_x_at | 568 | 523 | 1270 | GCATCTCTTTCTGCAAAGGCACCTG | Antisense | 3813 |
| 209140_x_at | 146 | 269 | 1285 | AAGGCACCTGAATGTGTCTGCGTCC | Antisense | 3814 |
| 209140_x_at | 305 | 753 | 1300 | GTCTGCGTCCCTGTTAGCATAATGT | Antisense | 3815 |
| 209567_at | 536 | 435 | 1146 | CCGCCTGGCTTGGGTGGCAAGAGAA | Antisense | 3816 |
| 209567_at | 1044 | 123 | 1167 | AGAAAAGGAGGACAGCGCCCAGGAG | Antisense | 3817 |
| 209567_at | 298 | 1099 | 1212 | TTTCTAACTGTCGGACCCGTCTGTA | Antisense | 3818 |
| 209567_at | 270 | 619 | 1225 | GACCCGTCTGTAAACCAAGGACTAT | Antisense | 3819 |
| 209567_at | 53 | 705 | 1266 | GTTCTAGGCAATTATACGGGGACTC | Antisense | 3820 |
| 209567_at | 487 | 483 | 1302 | GCCGCTGCCTTCATTGAGTTTAAAG | Antisense | 3821 |
| 209567_at | 382 | 693 | 1333 | GATTGCCCTTCCGTCAAGAAAGTAT | Antisense | 3822 |
| 209567_at | 181 | 1111 | 1386 | TTTTCCCACAACCGAGACTTTGGAG | Antisense | 3823 |
| 209567_at | 754 | 695 | 1531 | GTTGGCCATATTTCAGAGACTTAGA | Antisense | 3824 |
| 209567_at | 167 | 695 | 1554 | GATTGACGTATATGTTTCTGCATTA | Antisense | 3825 |
| 209567_at | 519 | 721 | 1597 | GTATCAGAGCGGGAGTGCGGGGGAG | Antisense | 3826 |
| 209606_at | 595 | 493 | 1164 | GAATTGCAAAACTGACATCCCATTT | Antisense | 3827 |
| 209606_at | 140 | 169 | 1174 | ACTGACATCCCATTTCACAGCAATA | Antisense | 3828 |
| 209606_at | 1008 | 309 | 1189 | CACAGCAATAGTGACCTTTATTTAA | Antisense | 3829 |
| 209606_at | 778 | 697 | 1217 | GTTGTGTTATAGTTTATGCTTCTTA | Antisense | 3830 |
| 209606_at | 422 | 1099 | 1249 | TTTCAACCTAAACAGCCAATTTCTA | Antisense | 3831 |
| 209606_at | 735 | 189 | 1260 | ACAGCCAATTTCTAAGCAGACAGGA | Antisense | 3832 |
| 209606_at | 240 | 1087 | 1369 | TATTTTCTAGATTATCCCTGTGAAT | Antisense | 3833 |
| 209606_at | 292 | 201 | 1485 | AAATCTTAGGTTTGCTTATGCCCAG | Antisense | 3834 |
| 209606_at | 775 | 499 | 1590 | GCTGTTTCTCACATCTATAGTGACA | Antisense | 3835 |
| 209606_at | 195 | 25 | 1639 | ATAGGAGGGGTTAAGGTTCATGAGA | Antisense | 3836 |
| 209606_at | 790 | 823 | 1679 | GGTCTGAGATGGGTGCTGCAAAGAT | Antisense | 3837 |
| 209774_x_at | 524 | 115 | 477 | AGAGAGACACAGCTGCAGAGGCCAC | Antisense | 3838 |
| 209774_x_at | 464 | 157 | 500 | ACCTGGATTGCGCCTAATGTGTTTG | Antisense | 3839 |
| 209774_x_at | 864 | 933 | 627 | TGATTGAATCTACTTGCACACTCTC | Antisense | 3840 |
| 209774_x_at | 256 | 541 | 642 | GCACACTCTCCCATTATATTTATTG | Antisense | 3841 |
| 209774_x_at | 1059 | 239 | 681 | AACCCAAGTTAGTTCAATCCTGATT | Antisense | 3842 |
| 209774_x_at | 486 | 561 | 725 | GAAGGTTTGCAGATATTCTCTAGTC | Antisense | 3843 |
| 209774_x_at | 232 | 607 | 773 | GACATATCACATGTCAGCCACTGTG | Antisense | 3844 |
| 209774_x_at | 1021 | 71 | 822 | ATGGCCAGTAAGATCAATGTGACGG | Antisense | 3845 |
| 209774_x_at | 628 | 919 | 839 | TGTGACGGCAGGGAAATGTATGTGT | Antisense | 3846 |
| 209774_x_at | 281 | 337 | 920 | CAGTGTGTGGTCAACATTTCTCATG | Antisense | 3847 |
| 209774_x_at | 889 | 61 | 1023 | ATGTTAATTATGCAGTGTTTCCCTC | Antisense | 3848 |
| 209849_s_at | 136 | 1059 | 710 | TACTGGCACAAGTTTATCTTCTTCC | Antisense | 3849 |
| 209849_s_at | 1139 | 41 | 725 | ATCTTCTTCCAGATTTCCTTTCAGA | Antisense | 3850 |
| 209849_s_at | 485 | 961 | 786 | TGCTTTTCCATTTCGTCATGACCTA | Antisense | 3851 |
| 209849_s_at | 608 | 401 | 817 | CTGTCTCTTCGTACTCGGTTATTAA | Antisense | 3852 |
| 209849_s_at | 895 | 451 | 938 | CCTTGCTTGTTCCTGCATTAGGGGA | Antisense | 3853 |
| 209849_s_at | 308 | 861 | 960 | GGAAAGTTGGGGACATGCTGCTACA | Antisense | 3854 |
| 209849_s_at | 111 | 503 | 976 | GCTGCTACAATACGGCTAATCTTTC | Antisense | 3855 |
| 209849_s_at | 949 | 543 | 1024 | GCAACATTGTACAAGTCACCCAGCC | Antisense | 3856 |
| 209849_s_at | 1123 | 743 | 1038 | GTCACCCAGCCAGAAGGAATGCACA | Antisense | 3857 |
| 209849_s_at | 862 | 683 | 1096 | GATACTGTTGTTACTTCTGCATGTT | Antisense | 3858 |
| 209849_s_at | 660 | 625 | 1143 | GAGCACCCGGAAACGGTCACGAGAC | Antisense | 3859 |
| 209894_at | 1074 | 877 | 4425 | GGCATAGGAACAGTTTTCTCTTCAT | Antisense | 3860 |
| 209894_at | 1099 | 289 | 4484 | AATTCAGTATTTGTCATTATGCAGT | Antisense | 3861 |
| 209894_at | 37 | 31 | 4515 | ATACCTACATAAGTCTATTCCATTA | Antisense | 3862 |
| 209894_at | 605 | 1111 | 4545 | TTTTGCGCTTGGCATATTTATTCCT | Antisense | 3863 |
| 209894_at | 841 | 141 | 4666 | AGCTGGGTATACCATTATTTCAAGT | Antisense | 3864 |
| 209894_at | 967 | 581 | 4761 | GAACACATTTTCTATAGCCCTTAAT | Antisense | 3865 |
| 209894_at | 1019 | 1081 | 4773 | TATAGCCCTTAATTTAGTTGTGTTA | Antisense | 3866 |
| 209894_at | 156 | 819 | 4807 | GGTGATGTATCAACAGCTTTTTTTT | Antisense | 3867 |
| 209894_at | 378 | 725 | 4863 | GTATGAATTGAGCTTTTTGCCCACA | Antisense | 3868 |
| 209894_at | 641 | 1111 | 4877 | TTTTGCCCACAGATTCTTGATTTGT | Antisense | 3869 |
| 209894_at | 899 | 357 | 4892 | CTTGATTTGTAGTTGTTTGGCAGGA | Antisense | 3870 |
| 210260_s_at | 1031 | 693 | 1244 | GATTGAGTCATCGACATTCAGGATT | Antisense | 3871 |
| 210260_s_at | 234 | 1 | 1263 | AGGATTTAAGTCTGAGGTAGTCAAC | Antisense | 3872 |
| 210260_s_at | 946 | 219 | 1300 | AAAAATGGCTTATCTGAAATCAGTA | Antisense | 3873 |
| 210260_s_at | 544 | 55 | 1376 | ATGCTTCTGGAATTGAGTTCTCCTT | Antisense | 3874 |
| 210260_s_at | 142 | 647 | 1390 | GAGTTCTCCTTTTAAGTACCAATGA | Antisense | 3875 |
| 210260_s_at | 855 | 923 | 1434 | TGTAATGGTGTGTCATTGCCTTGAA | Antisense | 3876 |
| 210260_s_at | 897 | 779 | 1443 | GTGTCATTGCCTTGAAATGCTTGCT | Antisense | 3877 |
| 210260_s_at | 276 | 949 | 1455 | TGAAATGCTTGCTTAGGGCTTCTTT | Antisense | 3878 |
| 210260_s_at | 86 | 223 | 1546 | AAAAGTCTAGATTGGTCTTGATATT | Antisense | 3879 |
| 210260_s_at | 748 | 293 | 1607 | CAATCTTCATTCTACAGATGAACTC | Antisense | 3880 |
| 210260_s_at | 833 | 493 | 1701 | GCGTGCGTTTCAGTGTTTAAGAAGG | Antisense | 3881 |
| 210538_s_at | 297 | 593 | 2493 | GAAAGTGTCCTATTTGTAGGAGTAC | Antisense | 3882 |
| 210538_s_at | 59 | 847 | 2511 | GGAGTACAATCAAGGGTACAGTTCG | Antisense | 3883 |
| 210538_s_at | 551 | 735 | 2526 | GTACAGTTCGTACATTTCTTTCATG | Antisense | 3884 |
| 210538_s_at | 135 | 27 | 2741 | ATAGGCTTTTGTTCTTATGAACGAA | Antisense | 3885 |
| 210538_s_at | 909 | 253 | 2767 | AAGAGGTAGCACTACAAACACAATA | Antisense | 3886 |
| 210538_s_at | 97 | 287 | 2871 | AATATTTTGGCATTGTACTAATACC | Antisense | 3887 |
| 210538_s_at | 727 | 873 | 2932 | GGCAGCATACTGAGACCCTGCCTTT | Antisense | 3888 |
| 210538_s_at | 456 | 221 | 2978 | AAAACACCAGGGACACATTTCTCTG | Antisense | 3889 |
| 210538_s_at | 512 | 337 | 2985 | CAGGGACACATTTCTCTGTCTTTTT | Antisense | 3890 |
| 210538_s_at | 821 | 1091 | 3008 | TTTGATCAGTGTCCTATACATCGAA | Antisense | 3891 |
| 210538_s_at | 935 | 759 | 3018 | GTCCTATACATCGAAGGTGTGCATA | Antisense | 3892 |
| 211529_x_at | 456 | 321 | 379 | CACCACCCTGTCTTTGACTATGAGG | Antisense | 3893 |
| 211529_x_at | 93 | 611 | 394 | GACTATGAGGCCACCCTGAGGTGCT | Antisense | 3894 |
| 211529_x_at | 47 | 1061 | 433 | TACCCTGCGGAGATCATACTGACCT | Antisense | 3895 |
| 211529_x_at | 349 | 617 | 487 | GACGTGGAGCTCGTGGAGACCAGGC | Antisense | 3896 |
| 211529_x_at | 896 | 643 | 573 | GAGATACACGTGCCATGTGCAGCAT | Antisense | 3897 |
| 211529_x_at | 145 | 643 | 624 | GAGATGGAAGCAGTCTTCCCTGCCC | Antisense | 3898 |
| 211529_x_at | 281 | 1157 | 683 | TTGTCCTTGCAGCTGTAGTCACTGG | Antisense | 3899 |
| 211529_x_at | 1098 | 137 | 763 | AGCTACTCTCAGGCTGCAAGCAGTG | Antisense | 3900 |
| 211529_x_at | 474 | 335 | 789 | CAGTGCCCAGGGCTCTAATGTGTCT | Antisense | 3901 |
| 211529_x_at | 976 | 779 | 808 | GTGTCTCTCACGGCTTGTAAATTGT | Antisense | 3902 |
| 211529_x_at | 1010 | 187 | 836 | ACAGCTGCCCTGTGTGGGACTGAGT | Antisense | 3903 |
| 211595_s_at | 673 | 193 | 560 | ACACAGATCCAGGTAGTCTCTGCTA | Antisense | 3904 |
| 211595_s_at | 320 | 753 | 575 | GTCTCTGCTAGTAATGAGCCCCTTG | Antisense | 3905 |
| 211595_s_at | 492 | 131 | 658 | AGCACAGACAGCAGGCATAGCCGCA | Antisense | 3906 |
| 211595_s_at | 197 | 145 | 676 | AGCCGCAGCGGCGAGAGCTAAACAA | Antisense | 3907 |
| 211595_s_at | 329 | 303 | 698 | CAAAAGGGCGTGATCCACATCCGAG | Antisense | 3908 |
| 211595_s_at | 1006 | 1157 | 752 | TTGTCTGCCATGCACGGACTGATCA | Antisense | 3909 |
| 211595_s_at | 331 | 855 | 767 | GGACTGATCATGGGCGGCCTGGAAG | Antisense | 3910 |
| 211595_s_at | 517 | 377 | 899 | CTCAGCTCCAGTGGGACCTTGTAAA | Antisense | 3911 |
| 211595_s_at | 203 | 853 | 912 | GGACCTTGTAAAATGCTCCCTGTCA | Antisense | 3912 |
| 211595_s_at | 996 | 989 | 928 | TCCCTGTCAGAGCTCTCCAGAATAT | Antisense | 3913 |
| 211595_s_at | 549 | 815 | 1036 | GGTGTGCCCCAGAAGTAAGCTTTGC | Antisense | 3914 |
| 211603_s_at | 522 | 821 | 1524 | GGTGCTGCCCTGTGTACATATAAAT | Antisense | 3915 |
| 211603_s_at | 740 | 817 | 1555 | GGTGTTGGGGAAACCTTCATCTGAA | Antisense | 3916 |
| 211603_s_at | 193 | 121 | 1634 | AGACTCTGAGCTGCTCACCGGAGTC | Antisense | 3917 |
| 211603_s_at | 960 | 501 | 1643 | GCTGCTCACCGGAGTCATTGGGAAG | Antisense | 3918 |
| 211603_s_at | 23 | 371 | 1690 | CTAGAGTCTCAGAAACTCCCCTGGG | Antisense | 3919 |
| 211603_s_at | 491 | 843 | 1732 | GGAGGAATTCAGCTCAGCTTCTTCC | Antisense | 3920 |
| 211603_s_at | 664 | 195 | 1797 | ACAAGAGTTTGTTCTGTTCTGGGGG | Antisense | 3921 |
| 211603_s_at | 444 | 995 | 1814 | TCTGGGGGACAGAGAAGGCGCTTCC | Antisense | 3922 |
| 211603_s_at | 991 | 515 | 1833 | GCTTCCCAACTTCATACTGGCAGGA | Antisense | 3923 |
| 211603_s_at | 540 | 819 | 1859 | GGTGAGGAGGTTCACTGAGCTCCCC | Antisense | 3924 |
| 211603_s_at | 718 | 421 | 1890 | CCCACTGCGGGGAGACAGAAGCCTG | Antisense | 3925 |
| 211700_s_at | 28 | 461 | 2132 | CCAGCACGGGCTTCAGTAGTGGACC | Antisense | 3926 |
| 211700_s_at | 703 | 853 | 2152 | GGACCCAGTTCTATTGTTGGCTTCA | Antisense | 3927 |
| 211700_s_at | 182 | 517 | 2171 | GCTTCAGCGGTGGACCAAGCACTGG | Antisense | 3928 |
| 211700_s_at | 495 | 467 | 2185 | CCAAGCACTGGTGTTGGCTTCTGCA | Antisense | 3929 |
| 211700_s_at | 805 | 91 | 2209 | AGTGGACCAAGCACCAGTGGCTTCA | Antisense | 3930 |
| 211700_s_at | 183 | 517 | 2228 | GCTTCAGCGGTGGACCGAGCACAGG | Antisense | 3931 |
| 211700_s_at | 777 | 435 | 2242 | CCGAGCACAGGAGCTGGCTTCGGCG | Antisense | 3932 |
| 211700_s_at | 1099 | 357 | 2259 | CTTCGGCGGTGGACCAAACACTGGT | Antisense | 3933 |
| 211700_s_at | 995 | 157 | 2301 | ACCGAGCACCAGTGCTGGCTTTGGC | Antisense | 3934 |
| 211700_s_at | 396 | 967 | 2313 | TGCTGGCTTTGGCAGTGGAGCCGCC | Antisense | 3935 |
| 211700_s_at | 1091 | 789 | 2351 | GTGGCTTCTCGTATGGCTAGTGAGG | Antisense | 3936 |
| 212349_at | 697 | 903 | 4080 | TGGAGTGTGTTCCTGAAGAGCAGCC | Antisense | 3937 |
| 212349_at | 103 | 663 | 4125 | GAGGCAGGCATAGGCAGGGAACCGA | Antisense | 3938 |
| 212349_at | 156 | 799 | 4141 | GGGAACCGAGCAGCAGGTCAGAGCA | Antisense | 3939 |
| 212349_at | 1027 | 73 | 4165 | AGGCGAGCTGACATTCTGCAGCCTG | Antisense | 3940 |
| 212349_at | 733 | 481 | 4185 | GCCTGGACGGCCATGGCAGGAAGCT | Antisense | 3941 |
| 212349_at | 913 | 245 | 4230 | AAGCCTCCTAGGGTTCTGAGCAGAA | Antisense | 3942 |
| 212349_at | 1123 | 813 | 4257 | GGGGCATGAGCTGATTCACATTCTG | Antisense | 3943 |
| 212349_at | 955 | 179 | 4274 | ACATTCTGAAGGACCTCTCTAGCTG | Antisense | 3944 |
| 212349_at | 236 | 211 | 4333 | AAAGCAGAGAGACCAGTGCAGGGCT | Antisense | 3945 |
| 212349_at | 790 | 699 | 4367 | GTTGCAGGCGAGAGACTGGGGTGCT | Antisense | 3946 |
| 212349_at | 173 | 1005 | 4425 | TCTCCCAAGAGACAAAGGCCATTGC | Antisense | 3947 |
| 212654_at | 304 | 815 | 804 | GGTGGCCGAGAGTAAATGTGGGGAC | Antisense | 3948 |
| 212654_at | 339 | 737 | 815 | GTAAATGTGGGGACCTAGAGGAGGA | Antisense | 3949 |
| 212654_at | 180 | 903 | 872 | TGGAGGCCCAGGCGGACAAGTATTC | Antisense | 3950 |
| 212654_at | 145 | 341 | 880 | CAGGCGGACAAGTATTCCACCAAAG | Antisense | 3951 |
| 212654_at | 339 | 673 | 1024 | GATGAAGTCTATGCCCAGAAGATGA | Antisense | 3952 |
| 212654_at | 447 | 77 | 1067 | AGGAACTGGACAACGCACTCAATGA | Antisense | 3953 |
| 212654_at | 592 | 599 | 1075 | GACAACGCACTCAATGACATCACCT | Antisense | 3954 |
| 212654_at | 541 | 981 | 1149 | TCCTTTCCATTCTCTCTATGGGGAG | Antisense | 3955 |
| 212654_at | 13 | 661 | 1186 | GAGGAGCAGAAATTGCCAACATTGC | Antisense | 3956 |
| 212654_at | 183 | 1147 | 1198 | TTGCCAACATTGCACAGCCAGGCTG | Antisense | 3957 |
| 212654_at | 208 | 405 | 1220 | CTGGGAGCAGCCTAGGGAGAGCCCC | Antisense | 3958 |
| 212671_s_at | 689 | 149 | 439 | ACCAATGAGGTTCCTGAGGTCACAG | Antisense | 3959 |
| 212671_s_at | 593 | 59 | 443 | ATGAGGTTCCTGAGGTCACAGTGTT | Antisense | 3960 |
| 212671_s_at | 710 | 83 | 446 | AGGTTCCTGAGGTCACAGTGTTTTC | Antisense | 3961 |
| 212671_s_at | 604 | 983 | 450 | TCCTGAGGTCACAGTGTTTTCCAAG | Antisense | 3962 |
| 212671_s_at | 458 | 749 | 512 | GTCTTGTGGACAACATCTTTCCTCC | Antisense | 3963 |
| 212671_s_at | 615 | 383 | 604 | CTCTCCAAGAGTGATCATTCCTTCT | Antisense | 3964 |
| 212671_s_at | 807 | 467 | 608 | CCAAGAGTGATCATTCCTTCTTCAA | Antisense | 3965 |
| 212671_s_at | 232 | 113 | 611 | AGAGTGATCATTCCTTCTTCAAGAT | Antisense | 3966 |
| 212671_s_at | 793 | 93 | 613 | AGTGATCATTCCTTCTTCAAGATCA | Antisense | 3967 |
| 212671_s_at | 731 | 671 | 664 | GATGAGATTTATGACTGCAAGGTGG | Antisense | 3968 |
| 212671_s_at | 573 | 443 | 709 | CCTCTTCTGAAACACTGGGAGCCTG | Antisense | 3969 |
| 212877_at | 1091 | 657 | 411 | GAGGAAAATGAAGCTCGGGCTGGTT | Antisense | 3970 |
| 212877_at | 973 | 571 | 420 | GAAGCTCGGGCTGGTTAACTGACTT | Antisense | 3971 |
| 212877_at | 178 | 505 | 423 | GCTCGGGCTGGTTAACTGACTTGCT | Antisense | 3972 |
| 212877_at | 519 | 407 | 426 | CGGGCTGGTTAACTGACTTGCTCAG | Antisense | 3973 |
| 212877_at | 244 | 497 | 429 | GCTGGTTAACTGACTTGCTCAGCGT | Antisense | 3974 |
| 212877_at | 613 | 417 | 543 | CGCTGTGTCTAGCAGCCTCTAGGAT | Antisense | 3975 |
| 212877_at | 800 | 923 | 548 | TGTCTAGCAGCCTCTAGGATCTTGT | Antisense | 3976 |
| 212877_at | 607 | 441 | 637 | CCTGATTTCTGTATACATGTAGCTT | Antisense | 3977 |
| 212877_at | 713 | 927 | 646 | TGTATACATGTAGCTTTGCCAGATA | Antisense | 3978 |
| 212877_at | 752 | 137 | 657 | AGCTTTGCCAGATATGTACTTAGTA | Antisense | 3979 |
| 212877_at | 1159 | 1083 | 692 | TATTAATAAAATCCATTTACTGTGT | Antisense | 3980 |
| 213008_at | 771 | 1053 | 1275 | TACATTTTTCCACGAGCTGGTGCAG | Antisense | 3981 |
| 213008_at | 433 | 603 | 1299 | GACAGCTCTGCCATCAGGCAGCTGT | Antisense | 3982 |
| 213008_at | 884 | 189 | 1369 | ACAGCCCTTGTCAGATATTATCTCC | Antisense | 3983 |
| 213008_at | 541 | 1003 | 1389 | TCTCCAGGTGTGTCAGAGCTCCGGA | Antisense | 3984 |
| 213008_at | 931 | 951 | 1442 | TGAAGCTGTCTGGTTCTCATCTGAC | Antisense | 3985 |
| 213008_at | 594 | 465 | 1559 | CCACAGCCATGGCCAGAGTTCTTCG | Antisense | 3986 |
| 213008_at | 1106 | 447 | 1600 | CCTAACCTCATCTTTGCCATAGAAC | Antisense | 3987 |
| 213008_at | 132 | 587 | 1630 | GAAAAATTTCTCATCCACCTTTCTA | Antisense | 3988 |
| 213008_at | 982 | 957 | 1676 | TGCAGCACATGAAGCTCAGCACCTC | Antisense | 3989 |
| 213008_at | 242 | 537 | 1694 | GCACCTCACGAGACTTCAAGATCAA | Antisense | 3990 |
| 213008_at | 1091 | 653 | 1771 | GAGGGCACTGCATCAGAGCATGGGG | Antisense | 3991 |
| 213539_at | 163 | 799 | 265 | GGGAACACTGCTCTCAGACATTACA | Antisense | 3992 |
| 213539_at | 711 | 613 | 291 | GACTGGACCTGGGAAAACGCATCCT | Antisense | 3993 |
| 213539_at | 701 | 417 | 308 | CGCATCCTGGACCCACGAGGAATAT | Antisense | 3994 |
| 213539_at | 383 | 553 | 368 | GAATCTACCGTGCAAGTTCATTATC | Antisense | 3995 |
| 213539_at | 835 | 781 | 408 | GTGTGGAGCTGGATCCAGCCACCGT | Antisense | 3996 |
| 213539_at | 610 | 119 | 507 | AGACTGGAAGGCTGTCTGGGGCTGC | Antisense | 3997 |
| 213539_at | 108 | 971 | 529 | TGCCGACACACAAGCTCTGTTGAGG | Antisense | 3998 |
| 213539_at | 964 | 867 | 552 | GGAATGACCAGGTCTATCAGCCCCT | Antisense | 3999 |
| 213539_at | 659 | 145 | 570 | AGCCCCTCCGAGATCGAGATGATGC | Antisense | 4000 |
| 213539_at | 1113 | 961 | 592 | TGCTCAGTACAGCCACCTTGGAGGA | Antisense | 4001 |
| 213539_at | 892 | 569 | 659 | GAAGCAGCCATTACCAACTGTACCT | Antisense | 4002 |
| 214901_at | 123 | 415 | 1597 | CGAAGCCGGCGGCGTGAACAATCCT | Antisense | 4003 |
| 214901_at | 645 | 339 | 1626 | CAGGAACTCACACCTGGTTCAGCAT | Antisense | 4004 |
| 214901_at | 712 | 525 | 1678 | GCAGGCGGAGCAAAGGCAGGGCAGC | Antisense | 4005 |
| 214901_at | 919 | 865 | 1779 | GGAAGAGCCTTCTGTGGGTGCTTCC | Antisense | 4006 |
| 214901_at | 777 | 1019 | 1928 | TCATGGGTGACTTCTGACTTTCTAA | Antisense | 4007 |
| 214901_at | 234 | 359 | 1963 | CTTCCCAAGCACCCGAGGTTGGTTG | Antisense | 4008 |
| 214901_at | 549 | 833 | 1983 | GGTTGGTCCCAAATCTATCAAACTC | Antisense | 4009 |
| 214901_at | 848 | 487 | 2011 | GCCCTCTTTAGCGACATATTTTGTG | Antisense | 4010 |
| 214901_at | 724 | 1157 | 2031 | TTGTGACATTCCTTCCATTACACCA | Antisense | 4011 |
| 214901_at | 1017 | 31 | 2075 | ATAACCTACCCACCTGTGTAATGTC | Antisense | 4012 |
| 214901_at | 881 | 281 | 2106 | AATCAATATGCGGCCCCATTTTGTA | Antisense | 4013 |
| 216438_s_at | 1086 | 185 | 150 | ACAGAGACGCAAGAGAAAAATCCAC | Antisense | 4014 |
| 216438_s_at | 546 | 277 | 168 | AATCCACTGCCTTCCAAAGAAACGA | Antisense | 4015 |
| 216438_s_at | 138 | 315 | 172 | CACTGCCTTCCAAAGAAACGATTGA | Antisense | 4016 |
| 216438_s_at | 670 | 849 | 200 | GGAGAAGCAAGCAGGCGAATCGTAA | Antisense | 4017 |
| 216438_s_at | 49 | 135 | 209 | AGCAGGCGAATCGTAATGAGGCGTG | Antisense | 4018 |
| 216438_s_at | 556 | 957 | 245 | TGCACTGTACATTCCACAAGCATTG | Antisense | 4019 |
| 216438_s_at | 569 | 167 | 248 | ACTGTACATTCCACAAGCATTGCCT | Antisense | 4020 |
| 216438_s_at | 9 | 109 | 308 | AGATGCAAAGAGGTTGGATCAAGTT | Antisense | 4021 |
| 216438_s_at | 178 | 259 | 328 | AAGTTTAAATGACTGTGCTGCCCCT | Antisense | 4022 |
| 216438_s_at | 744 | 591 | 426 | GAAAGAACTTGCATGTTGGTGAAGG | Antisense | 4023 |
| 216438_s_at | 432 | 499 | 516 | GCTGTAATGCAGTTTAATCAGAGTG | Antisense | 4024 |
| 216920_s_at | 416 | 313 | 881 | CACTACTGCTGCAGCTCACAAACAC | Antisense | 4025 |
| 216920_s_at | 585 | 509 | 894 | GCTCACAAACACCTCTGCATATTAC | Antisense | 4026 |
| 216920_s_at | 504 | 1001 | 907 | TCTGCATATTACATGTACCTCCTCC | Antisense | 4027 |
| 216920_s_at | 513 | 783 | 944 | GTGTGGTCTATTTTGCCATCATCAC | Antisense | 4028 |
| 216920_s_at | 940 | 891 | 1115 | GGCCATTTCAGTTCTCATGTGTGTA | Antisense | 4029 |
| 216920_s_at | 978 | 829 | 1161 | GGTTTTCAAACCAGTGGGCACACAG | Antisense | 4030 |
| 216920_s_at | 584 | 989 | 1323 | TCCCTCTCTTAGTGTTCTTTAATCA | Antisense | 4031 |
| 216920_s_at | 126 | 35 | 1349 | ATAACTGCCTGGAAGCCTTTCATTT | Antisense | 4032 |
| 216920_s_at | 170 | 897 | 1358 | TGGAAGCCTTTCATTTTACACGCCC | Antisense | 4033 |
| 216920_s_at | 1055 | 417 | 1378 | CGCCCTGAAGCAGTCTTCTTTGCTA | Antisense | 4034 |
| 216920_s_at | 1041 | 1115 | 1409 | TTATGTGGTGTGTTTTTCCGTAATA | Antisense | 4035 |
| 217456_x_at | 208 | 415 | 1025 | CGACAGTGCCCAGGGGTCTGAGTCT | Antisense | 4036 |
| 217456_x_at | 721 | 213 | 1060 | AAAGCCTGAGACAGCTGCCTTGTGT | Antisense | 4037 |
| 217456_x_at | 1110 | 503 | 1101 | GCTGCCTTGTGTGCGACTGAGATGC | Antisense | 4038 |
| 217456_x_at | 756 | 941 | 1118 | TGAGATGCAGGATTTCCTCACGCCT | Antisense | 4039 |
| 217456_x_at | 505 | 879 | 1167 | GGCTTCTCTTTTTGCAAGGGCCTCT | Antisense | 4040 |
| 217456_x_at | 370 | 999 | 1195 | TCTGTCTGTGTCCCTGTTAGCACAA | Antisense | 4041 |
| 217456_x_at | 687 | 575 | 1320 | GAACCTGGGCAGAGTGCGGCAGTCA | Antisense | 4042 |
| 217456_x_at | 635 | 47 | 1399 | ATCGAAACCATCCTGCTAAGAGGTG | Antisense | 4043 |
| 217456_x_at | 26 | 509 | 1413 | GCTAAGAGGTGAACCGTCTCTACTA | Antisense | 4044 |
| 217456_x_at | 760 | 895 | 1455 | TGGCGCAGAGGCAGGCTGTGATCCA | Antisense | 4045 |
| 217456_x_at | 341 | 773 | 1472 | GTGATCCAGCTACTCAGGAGCGAGC | Antisense | 4046 |
| 217885_at | 1035 | 671 | 1499 | GATGACAATTCAGACCAGGCTCACC | Antisense | 4047 |
| 217885_at | 719 | 821 | 1524 | GGTGCCGTCACTTAGGAATGCTGGA | Antisense | 4048 |
| 217885_at | 899 | 121 | 1578 | AGACATGCCATCTCTAGAACCTTTT | Antisense | 4049 |
| 217885_at | 901 | 491 | 1649 | GCGAGTCCAGAAACATTATTGCCCA | Antisense | 4050 |
| 217885_at | 105 | 81 | 1712 | AGGAGCGCAGGAAGTCACTACCATT | Antisense | 4051 |
| 217885_at | 793 | 705 | 1762 | GTTCATAGGACTTCTGATGTGTTCA | Antisense | 4052 |
| 217885_at | 122 | 645 | 1804 | GAGATCATTATGCTTTGTGCCCTGG | Antisense | 4053 |
| 217885_at | 262 | 871 | 1861 | GGCAAGGGCAGCTTCATTCTAAGCC | Antisense | 4054 |
| 217885_at | 495 | 303 | 1918 | CAACACTAAGGCTCCTCTGTCAGAG | Antisense | 4055 |
| 217885_at | 939 | 111 | 1939 | AGAGGAGGTCGTCTTGTTTTTGCTT | Antisense | 4056 |
| 217885_at | 761 | 1131 | 1962 | TTCATTGCATGACATAACCCTTCCC | Antisense | 4057 |
| 217995_at | 660 | 1055 | 1111 | TACGTCAAAGACCGCTGCTGCAGTA | Antisense | 4058 |
| 217995_at | 560 | 529 | 1130 | GCAGTAGCTGCCCAGTCAGGAATAC | Antisense | 4059 |
| 217995_at | 948 | 509 | 1212 | GCTACACATCATGTCCACTGGTGAC | Antisense | 4060 |
| 217995_at | 28 | 315 | 1227 | CACTGGTGACCGGCTACAACCGTGT | Antisense | 4061 |
| 217995_at | 625 | 195 | 1242 | ACAACCGTGTGATTCTTGCTGAGTT | Antisense | 4062 |
| 217995_at | 896 | 489 | 1318 | GCGCCTTTCCATGTATCTCATGAAA | Antisense | 4063 |
| 217995_at | 615 | 623 | 1398 | GACCAGCGTTTCTGCGCAAGTTGTT | Antisense | 4064 |
| 217995_at | 1 | 1039 | 1439 | TAAGGATGGCTCAGCACTTGCTCAT | Antisense | 4065 |
| 217995_at | 633 | 879 | 1471 | GGCTTCTGGGCCAAAACTGCAGTCA | Antisense | 4066 |
| 217995_at | 1119 | 739 | 1558 | GTAATGGTGACCAAATGCCTCCCTT | Antisense | 4067 |
| 217995_at | 541 | 783 | 1608 | GTGGGCTACTCATGATGGGCTTGAT | Antisense | 4068 |
| 218363_at | 693 | 997 | 2253 | TCTGGACATGAGCCTTTGACCTGGG | Antisense | 4069 |
| 218363_at | 794 | 123 | 2284 | AGAAAGAACCACAAACTCCATCTCC | Antisense | 4070 |
| 218363_at | 648 | 237 | 2297 | AACTCCATCTCCCAATAGAACTTTG | Antisense | 4071 |
| 218363_at | 849 | 1151 | 2319 | TTGAAATTCACTCAGCTTTTCCTTT | Antisense | 4072 |
| 218363_at | 614 | 1111 | 2335 | TTTTCCTTTCATGCTGTTTGTTGCC | Antisense | 4073 |
| 218363_at | 917 | 983 | 2375 | TCCTGCCCCAGAACTGCAAGATTTT | Antisense | 4074 |
| 218363_at | 2 | 517 | 2402 | GCTTCACCCCTTTCTGAGAGTAATG | Antisense | 4075 |
| 218363_at | 961 | 427 | 2456 | CCCTGTATTCTGTGCTTCATCGAAT | Antisense | 4076 |
| 218363_at | 899 | 543 | 2483 | GCAAGACTGACCTCTTTTAAGCATT | Antisense | 4077 |
| 218363_at | 552 | 249 | 2501 | AAGCATTTAATTCACTCCCAGAGTC | Antisense | 4078 |
| 218363_at | 878 | 799 | 2574 | GGGACACTGAGCTTACTTAATACAT | Antisense | 4079 |
| 218807_at | 1032 | 969 | 4366 | TGCCGTCAGCCGAACTTTGTTATGG | Antisense | 4080 |
| 218807_at | 727 | 903 | 4388 | TGGAGGGAGCAGCCTCACACAAGCA | Antisense | 4081 |
| 218807_at | 584 | 587 | 4413 | GAAACACTCCTGTGGATGGTATTGT | Antisense | 4082 |
| 218807_at | 1142 | 1067 | 4456 | TAGTCAATAGACCCTCTCCTTATAA | Antisense | 4083 |
| 218807_at | 255 | 531 | 4529 | GCAGAGGATATTGGAGCCCCTTTTT | Antisense | 4084 |
| 218807_at | 886 | 53 | 4543 | AGCCCCTTTTTGTGACATTACCAAT | Antisense | 4085 |
| 218807_at | 639 | 1063 | 4561 | TACCAATTACATCTTTGTCCACGTT | Antisense | 4086 |
| 218807_at | 420 | 921 | 4576 | TGTCCACGTTTAATACTTTGTTTTG | Antisense | 4087 |
| 218807_at | 77 | 63 | 4656 | ATGTTTTCCATATACTTTGTCTTGC | Antisense | 4088 |
| 218807_at | 752 | 1055 | 4668 | TACTTTGTCTTGCCTGTATGCAGCC | Antisense | 4089 |
| 218807_at | 355 | 723 | 4683 | GTATGCAGCCCTTGTGTAATATGGT | Antisense | 4090 |
| 221265_s_at | 266 | 1025 | 1980 | TCACCTCTAGAATAGCCACCCAAAG | Antisense | 4091 |
| 221265_s_at | 798 | 117 | 2003 | AGACCTTCCTGAGGCTGCCTCAGAA | Antisense | 4092 |
| 221265_s_at | 430 | 447 | 2020 | CCTCAGAAGCACCACTTGCTGTTTT | Antisense | 4093 |
| 221265_s_at | 707 | 565 | 2130 | GAAGATAGCTGCTGTTCCCATGATG | Antisense | 4094 |
| 221265_s_at | 541 | 991 | 2145 | TCCCATGATGGGCACATTTCCTGAG | Antisense | 4095 |
| 221265_s_at | 485 | 167 | 2181 | ACTGATGAGCATAGAGCACCCCTGC | Antisense | 4096 |
| 221265_s_at | 85 | 341 | 2212 | CAGGAAACCTGACCGGCAGGGGCTC | Antisense | 4097 |
| 221265_s_at | 243 | 385 | 2236 | CTCTGGCTTCCTGAAAGCTTCACCT | Antisense | 4098 |
| 221265_s_at | 1056 | 1011 | 2260 | TCTTCCCTCGTTTATATCTCAACTG | Antisense | 4099 |
| 221265_s_at | 858 | 543 | 2319 | GCAACTCAGACTGTCTGGAGCTTGC | Antisense | 4100 |
| 221265_s_at | 242 | 715 | 2368 | GTTTCAGAACTTTCCTTAGGACTTG | Antisense | 4101 |
| 221875_x_at | 921 | 1007 | 526 | TCTACCCTGCGGAGATCACGCTGAC | Antisense | 4102 |
| 221875_x_at | 352 | 863 | 569 | GGAACAGACCCAGGACACAGAGCTT | Antisense | 4103 |
| 221875_x_at | 320 | 329 | 586 | CAGAGCTTGTGGAGACCAGGCCTGC | Antisense | 4104 |
| 221875_x_at | 623 | 73 | 603 | AGGCCTGCAGGGGATGGAACCTTCC | Antisense | 4105 |
| 221875_x_at | 183 | 975 | 625 | TCCAGAAGTGGGCCGCTGTGGTGGT | Antisense | 4106 |
| 221875_x_at | 576 | 323 | 705 | CAGCCCCTCATCCTGAGATGGGAGC | Antisense | 4107 |
| 221875_x_at | 692 | 929 | 776 | TGTTGTCCTTGGAGCTGTGGTCACT | Antisense | 4108 |
| 221875_x_at | 910 | 403 | 805 | CTGTGGTCGCTGCTGTGATGTGGAG | Antisense | 4109 |
| 221875_x_at | 1099 | 137 | 858 | AGCTACTCTCAGGCTGCAGTGTGAG | Antisense | 4110 |
| 221875_x_at | 67 | 773 | 878 | GTGAGACAGCTTCCTTGTGTGGGAC | Antisense | 4111 |
| 221875_x_at | 825 | 5 | 930 | ATTGCACTTGTGCCTCACGAACATA | Antisense | 4112 |
| 223168_at | 845 | 31 | 3453 | ATACTTGAGATTTTCCTCCATTTTT | Antisense | 4113 |
| 223168_at | 839 | 197 | 3568 | AAATTGTTAAACTTGCAGCTTGGTA | Antisense | 4114 |
| 223168_at | 902 | 633 | 3626 | GAGAATGCCACTTTGGCTGAACTAC | Antisense | 4115 |
| 223168_at | 500 | 173 | 3646 | ACTACAAGTGTAGGCCACCATTATA | Antisense | 4116 |
| 223168_at | 1013 | 901 | 3732 | TGGACCTTTTATAACCTTGTTCTCT | Antisense | 4117 |
| 223168_at | 1038 | 327 | 3763 | CAGACTCAAGAGAAACTACCCAGGT | Antisense | 4118 |
| 223168_at | 975 | 171 | 3777 | ACTACCCAGGTATTACACAAGCCAA | Antisense | 4119 |
| 223168_at | 751 | 205 | 3801 | AAATGGGAGCAAGGCCTTCTCTCCA | Antisense | 4120 |
| 223168_at | 406 | 361 | 3816 | CTTCTCTCCAGACTATCGTAACCTG | Antisense | 4121 |
| 223168_at | 525 | 1 | 3830 | ATCGTAACCTGGTGCCTTACCAAGT | Antisense | 4122 |
| 223168_at | 345 | 477 | 3843 | GCCTTACCAAGTTGTGCTTTTCTGT | Antisense | 4123 |
| 223593_at | 41 | 875 | 1467 | GGCAGCTGCAGACAAGTGGTTAACT | Antisense | 4124 |
| 223593_at | 336 | 595 | 1477 | GACAAGTGGTTAACTGGTTTGGCAG | Antisense | 4125 |
| 223593_at | 920 | 1159 | 1495 | TTGGCAGAATGGCATGTTCCTGCTG | Antisense | 4126 |
| 223593_at | 255 | 667 | 1593 | GATGGGGGTATTAATGCTCCCTGGA | Antisense | 4127 |
| 223593_at | 9 | 505 | 1608 | GCTCCCTGGAAATGCTTTCTACGTC | Antisense | 4128 |
| 223593_at | 1103 | 371 | 1626 | CTACGTCGATAGCTCAGCTCCTAGC | Antisense | 4129 |
| 223593_at | 458 | 981 | 1644 | TCCTAGCCCTTACTTGAGAGCATCC | Antisense | 4130 |
| 223593_at | 768 | 667 | 1696 | GATGTGGCCTTCCAGGTATTAGCAC | Antisense | 4131 |
| 223593_at | 444 | 891 | 1701 | GGCCTTCCAGGTATTAGCACAACTT | Antisense | 4132 |
| 223593_at | 635 | 171 | 1884 | ACTCTGGCCTGCATGGCAGAACAAG | Antisense | 4133 |
| 223593_at | 445 | 201 | 1934 | AAATCAAACTAATCATGCTGCTCAT | Antisense | 4134 |
| 223646_s_at | 435 | 225 | 1999 | AAAATACTGGACCCACTTCTTTCAG | Antisense | 4135 |
| 223646_s_at | 476 | 565 | 2031 | GAAGATACCTTATATGCCCTAAAGT | Antisense | 4136 |
| 223646_s_at | 1055 | 485 | 2046 | GCCCTAAAGTTAATACCAGCAGTCA | Antisense | 4137 |
| 223646_s_at | 612 | 885 | 2131 | GGCTGTGACACTTCTTTGTGGTACT | Antisense | 4138 |
| 223646_s_at | 526 | 159 | 2363 | ACCCTTTGCAGAAGATTCCCTTGTA | Antisense | 4139 |
| 223646_s_at | 989 | 1139 | 2378 | TTCCCTTGTAAATGGCCCTGTGGCA | Antisense | 4140 |
| 223646_s_at | 534 | 877 | 2399 | GGCATGCCCAGTATCTGCAATGTTC | Antisense | 4141 |
| 223646_s_at | 253 | 871 | 2437 | GGCAAACCTCTCTGTTTGCCAAGCC | Antisense | 4142 |
| 223646_s_at | 175 | 717 | 2450 | GTTTGCCAAGCCTGCAGAGTTGAAC | Antisense | 4143 |
| 223646_s_at | 979 | 1049 | 2490 | TACAATCTGACCCTGTTTTTTGGCC | Antisense | 4144 |
| 223646_s_at | 176 | 429 | 2513 | CCCTGTTTCTGGACACTGTAGCTGA | Antisense | 4145 |
| 223746_at | 1101 | 691 | 356 | GATTCCTGGTCTTTTTAACACGAAG | Antisense | 4146 |
| 223746_at | 604 | 1005 | 395 | TCTCTTTTGTAGGATCTGTATGATT | Antisense | 4147 |
| 223746_at | 583 | 15 | 541 | ATTTTAATATTTGCACCTTTGTGAA | Antisense | 4148 |
| 223746_at | 1123 | 197 | 577 | AAATTAAGCACTATCACCACCTTCA | Antisense | 4149 |
| 223746_at | 439 | 189 | 601 | ACAGCTACTTAGGAGATCCACAATC | Antisense | 4150 |
| 223746_at | 220 | 675 | 615 | GATCCACAATCCTGGGTTGGGAGCC | Antisense | 4151 |
| 223746_at | 749 | 625 | 635 | GAGCCAGTGGATTTCCTGAAACACA | Antisense | 4152 |
| 223746_at | 426 | 193 | 655 | ACACAGATTTGTTAATGCGTTTATA | Antisense | 4153 |
| 223746_at | 20 | 767 | 707 | GTGCAGTGACCATCATTGACTTTCA | Antisense | 4154 |
| 223746_at | 706 | 289 | 779 | AATTCAATCCTGTGTATTTATTCCT | Antisense | 4155 |
| 223746_at | 530 | 1105 | 795 | TTTATTCCTTCTTCTGTAATGACCA | Antisense | 4156 |
| 223819_x_at | 665 | 623 | 547 | GACCAGCTCCAGGAGCTCTGCATCC | Antisense | 4157 |
| 223819_x_at | 374 | 493 | 599 | GCGTGGTATTTGGGAGCCAGCGGCC | Antisense | 4158 |
| 223819_x_at | 24 | 1155 | 629 | TTGATTCTGTGGCCCAGCAGCAGGG | Antisense | 4159 |
| 223819_x_at | 802 | 391 | 661 | CTGCCGCATGTTGCTGACTTTCGGT | Antisense | 4160 |
| 223819_x_at | 999 | 627 | 738 | GAGCGTCCTGATGCAGCTGAAGCTT | Antisense | 4161 |
| 223819_x_at | 861 | 911 | 768 | TGGGTCAGCATACCGCTTTGAGGTC | Antisense | 4162 |
| 223819_x_at | 314 | 469 | 799 | GCCAAGTTCCAGGAGCTGCGGTACA | Antisense | 4163 |
| 223819_x_at | 1157 | 1027 | 896 | TCACTTGACCAGTCCCATTCAGATC | Antisense | 4164 |
| 223819_x_at | 1124 | 821 | 944 | GGTGCCAAAGTGCAGCTGACTCTTC | Antisense | 4165 |
| 223819_x_at | 638 | 1141 | 986 | TTCCCATGAGGCAGGCTCTTCAGTG | Antisense | 4166 |
| 223819_x_at | 986 | 629 | 1056 | GAGCTATGCCTTTTTTTCTTTTTGG | Antisense | 4167 |
| 223945_x_at | 258 | 303 | 438 | CAACATTCTCTTCTCAAACACTGAC | Antisense | 4168 |
| 223945_x_at | 417 | 917 | 527 | TGTGGGTCACAGCAGTGAGCTCCCA | Antisense | 4169 |
| 223945_x_at | 512 | 463 | 549 | CCACCCGCCTTGCAGTGAAGATGTG | Antisense | 4170 |
| 223945_x_at | 81 | 849 | 580 | GGAGAGGGAGTGTCTCCTTCCAGGT | Antisense | 4171 |
| 223945_x_at | 840 | 85 | 601 | AGGTGCTAGCTCTGGACAGCAGCTG | Antisense | 4172 |
| 223945_x_at | 587 | 859 | 636 | GGAAAGTTTCTTCATCGTTGTCCTC | Antisense | 4173 |
| 223945_x_at | 548 | 445 | 657 | CCTCCCTGCTGGTCACATGAGTTTA | Antisense | 4174 |
| 223945_x_at | 999 | 161 | 681 | ACGATTCCTTAGAAGTGTCTCCCAC | Antisense | 4175 |
| 223945_x_at | 1127 | 633 | 722 | GAGAATCTCTGAGGCGTGTCTTCCA | Antisense | 4176 |
| 223945_x_at | 591 | 969 | 764 | TGCCCTCCACAGTGTAGGCTTGAAC | Antisense | 4177 |
| 223945_x_at | 623 | 75 | 779 | AGGCTTGAACACTTGGCCTCATGCG | Antisense | 4178 |
| 224153_s_at | 1005 | 531 | 860 | GCAGAACATATGTAACCAGAAGGAC | Antisense | 4179 |
| 224153_s_at | 169 | 1153 | 970 | TTGAGTGCAAGTGGGCTGAGTCTGA | Antisense | 4180 |
| 224153_s_at | 863 | 767 | 974 | GTGCAAGTGGGCTGAGTCTGAAAAC | Antisense | 4181 |
| 224153_s_at | 896 | 263 | 1071 | AAGTGGTTATCTATTGTTAGCAGAG | Antisense | 4182 |
| 224153_s_at | 1011 | 811 | 1119 | GGGGAGATGATAAGACCCATTGTCC | Antisense | 4183 |
| 224153_s_at | 875 | 59 | 1125 | ATGATAAGACCCATTGTCCAGAAGA | Antisense | 4184 |
| 224153_s_at | 667 | 615 | 1151 | GACTGTCACAAGGTCGATTGATCAG | Antisense | 4185 |
| 224153_s_at | 450 | 605 | 1185 | GACAGGGACAGGTCACAATGGTGGA | Antisense | 4186 |
| 224153_s_at | 815 | 271 | 1201 | AATGGTGGAATGTTGTAATGTTGGT | Antisense | 4187 |
| 224153_s_at | 231 | 1103 | 1253 | TTTACTTCTTGTGTGGTTTTTCAGC | Antisense | 4188 |
| 224153_s_at | 1161 | 1131 | 1258 | TTCTTGTGTGGTTTTTCAGCTGCCC | Antisense | 4189 |
| 224908_s_at | 277 | 149 | 2301 | ACCAAGCCTGGCTTTATGTATTTAT | Antisense | 4190 |
| 224908_s_at | 343 | 187 | 2387 | ACAGAAGGTTATGCCTGGCTCCCAG | Antisense | 4191 |
| 224908_s_at | 348 | 909 | 2454 | TGGGGGAGGAGTCATGGTTTATTTG | Antisense | 4192 |
| 224908_s_at | 558 | 969 | 2549 | TGCCTTAGTTTCTTAGCCCATGAAA | Antisense | 4193 |
| 224908_s_at | 500 | 619 | 2587 | GACCCAGGGACTACCTCAAGGGCTT | Antisense | 4194 |
| 224908_s_at | 1051 | 865 | 2634 | GGAAGATGCAAGAGCCTTTAGTACC | Antisense | 4195 |
| 224908_s_at | 192 | 117 | 2644 | AGAGCCTTTAGTACCAAGGTTCTCA | Antisense | 4196 |
| 224908_s_at | 658 | 425 | 2738 | CCCGGACAGTTAAATCAGAACCTCA | Antisense | 4197 |
| 224908_s_at | 811 | 327 | 2753 | CAGAACCTCAGACAGCAATATGCCT | Antisense | 4198 |
| 224908_s_at | 319 | 21 | 2770 | ATATGCCTTGAGATGCCTTGAACCA | Antisense | 4199 |
| 224908_s_at | 464 | 643 | 2779 | GAGATGCCTTGAACCATGCTTGAGA | Antisense | 4200 |
| 225432_s_at | 553 | 887 | 3003 | GGCGCTGATGCGAATACAGCTCACA | Antisense | 4201 |
| 225432_s_at | 986 | 693 | 3081 | GATTGATTTCACAGGGAGCTCTAAT | Antisense | 4202 |
| 225432_s_at | 222 | 45 | 3104 | ATCTCTGTGATTACATGGTCCTTCA | Antisense | 4203 |
| 225432_s_at | 1095 | 449 | 3123 | CCTTCAAACTCCCAACCAAAGTGAG | Antisense | 4204 |
| 225432_s_at | 531 | 943 | 3175 | TGAGCAGCCCTTTAGCAAAATCGCC | Antisense | 4205 |
| 225432_s_at | 225 | 387 | 3273 | CTCCCTCCACCTGACAGTTTGTAAG | Antisense | 4206 |
| 225432_s_at | 688 | 43 | 3309 | ATCTAACCTGATGCTCTTGGAGAGA | Antisense | 4207 |
| 225432_s_at | 991 | 643 | 3332 | GAGATAACCTGTCTGTCATAACTTA | Antisense | 4208 |
| 225432_s_at | 654 | 513 | 3379 | GCTATTAAAGATTCATGCAGTCCCA | Antisense | 4209 |
| 225432_s_at | 409 | 959 | 3394 | TGCAGTCCCAAAAGGCACTGTCCTG | Antisense | 4210 |
| 225432_s_at | 847 | 349 | 3446 | CATAAAAGGAATCCAACCCTGTGCC | Antisense | 4211 |
| 225502_at | 1153 | 571 | 5134 | GAAGCCTTACTACAATTCCAAAAAT | Antisense | 4212 |
| 225502_at | 895 | 39 | 5157 | ATCATCATGGTTGGAAATTTGGGAG | Antisense | 4213 |
| 225502_at | 522 | 1085 | 5187 | TATTTGTGAACTTGTTACCCTTTTG | Antisense | 4214 |
| 225502_at | 162 | 741 | 5212 | GTAATGGTGGACTAATTGCTGTATA | Antisense | 4215 |
| 225502_at | 885 | 1051 | 5319 | TACACGGTACTTGGAGCAGTCAGCC | Antisense | 4216 |
| 225502_at | 659 | 1029 | 5349 | TCACAGATACTGCTTTCACTTAAAT | Antisense | 4217 |
| 225502_at | 87 | 291 | 5380 | AATTCTCCGATAATGCTTTGCTTTT | Antisense | 4218 |
| 225502_at | 1017 | 743 | 5413 | GTCACTCTTGTGTACTATCTATTTT | Antisense | 4219 |
| 225502_at | 324 | 1159 | 5420 | TTGTGTACTATCTATTTTTCTCCTC | Antisense | 4220 |
| 225502_at | 283 | 251 | 5469 | AAGCAATAATATCTCTGTTTTCATT | Antisense | 4221 |
| 225502_at | 218 | 45 | 5479 | ATCTCTGTTTTCATTTCAGAACATT | Antisense | 4222 |
| 225736_at | 96 | 445 | 675 | CCTCTGGATATTGATGCCTCGGGTG | Antisense | 4223 |
| 225736_at | 1112 | 899 | 719 | TGGACACCGAATCCAGAGTGCCACT | Antisense | 4224 |
| 225736_at | 478 | 315 | 740 | CACTGTGCTCCTCAACGAGGACGTC | Antisense | 4225 |
| 225736_at | 837 | 671 | 768 | GATGAGAAGACTGCTGAGGCTGCGA | Antisense | 4226 |
| 225736_at | 83 | 939 | 782 | TGAGGCTGCGATGCAGCGCCTCAAA | Antisense | 4227 |
| 225736_at | 743 | 211 | 804 | AAAGCGGCCAACATTCCAGAGCATA | Antisense | 4228 |
| 225736_at | 596 | 631 | 822 | GAGCATAACACCATTGGCTTCATGT | Antisense | 4229 |
| 225736_at | 659 | 879 | 837 | GGCTTCATGTTTGCATGCGTTGGCA | Antisense | 4230 |
| 225736_at | 157 | 695 | 855 | GTTGGCAGGGGCTTTCAGTATTACA | Antisense | 4231 |
| 225736_at | 584 | 987 | 932 | TCCCTTATTCGGCTTCTTTGGAAAT | Antisense | 4232 |
| 225736_at | 225 | 71 | 1056 | ATGGCACTCATACATCTGGGGTCAT | Antisense | 4233 |
| 225853_at | 248 | 181 | 3372 | ACATATGTCGGCTACCGTGTCTGGC | Antisense | 4234 |
| 225853_at | 178 | 923 | 3389 | TGTCTGGCCGTTCACATCTTTGGCC | Antisense | 4235 |
| 225853_at | 214 | 181 | 3402 | ACATCTTTGGCCACTATTTGCTTGT | Antisense | 4236 |
| 225853_at | 336 | 1039 | 3499 | TAAGATGCACTGTAACATCTCTGAA | Antisense | 4237 |
| 225853_at | 1044 | 711 | 3554 | GTTTTGTTAGCAATACACTGTCTTT | Antisense | 4238 |
| 225853_at | 414 | 1051 | 3567 | TACACTGTCTTTTAGTGGTGCCTAA | Antisense | 4239 |
| 225853_at | 838 | 569 | 3629 | GAAGCACAGTATGCAGGTAGGCCTA | Antisense | 4240 |
| 225853_at | 583 | 527 | 3641 | GCAGGTAGGCCTAATGGGGGAAGAT | Antisense | 4241 |
| 225853_at | 519 | 247 | 3709 | AAGCTGTTCTGTGGATGACCTACCC | Antisense | 4242 |
| 225853_at | 933 | 1123 | 3740 | TTAAACACGATTCTCTCACTTCCAA | Antisense | 4243 |
| 225853_at | 1134 | 465 | 3761 | CCAACTCCAAACTTGCTCAACTAAT | Antisense | 4244 |
| 225882_at | 1108 | 535 | 2178 | GCACCTTACATATTTGATGCTCAGG | Antisense | 4245 |
| 225882_at | 944 | 461 | 2283 | CCACCCTTACATCTCCATAGTTGGT | Antisense | 4246 |
| 225882_at | 1067 | 695 | 2302 | GTTGGTACAGTTAGCTTGTAGCAGC | Antisense | 4247 |
| 225882_at | 561 | 51 | 2335 | ATGCCTGGAGATCACTGTCTGTTGG | Antisense | 4248 |
| 225882_at | 429 | 401 | 2349 | CTGTCTGTTGGTCTGATCTCAGTAT | Antisense | 4249 |
| 225882_at | 844 | 333 | 2368 | CAGTATCATACTGAGACACCTCCCC | Antisense | 4250 |
| 225882_at | 909 | 441 | 2391 | CCTGAGCCTTACCTACTTAAATTGG | Antisense | 4251 |
| 225882_at | 899 | 661 | 2453 | GAGGCAAGTTGCAAGGGAGCCAGAG | Antisense | 4252 |
| 225882_at | 841 | 285 | 2534 | AATTTCTTTGGCACATTGACTTACT | Antisense | 4253 |
| 225882_at | 169 | 873 | 2543 | GGCACATTGACTTACTGATATCTTT | Antisense | 4254 |
| 225882_at | 408 | 1001 | 2614 | TATTCCCCGGCGCAATAAAAATGCC | Antisense | 4255 |
| 226043_at | 966 | 89 | 2223 | AGTGGGGGGGTGGTCAGTGGAAGCT | Antisense | 4256 |
| 226043_at | 952 | 141 | 2244 | AGCTGGGGAGGCTTCACTCAGCTCA | Antisense | 4257 |
| 226043_at | 871 | 1027 | 2327 | TCACTGCTCTCTCCATGGGGAGGGG | Antisense | 4258 |
| 226043_at | 609 | 337 | 2357 | CAGGGCACCAAGTTCGGGATCCTAG | Antisense | 4259 |
| 226043_at | 79 | 435 | 2542 | CCCCACTCTCAGGCTAGGATGGAGA | Antisense | 4260 |
| 226043_at | 710 | 431 | 2667 | CCCCCCCGCATACTTGAATGTATGT | Antisense | 4261 |
| 226043_at | 11 | 727 | 2686 | GTATGTGCGTATTTATTGCTCACGT | Antisense | 4262 |
| 226043_at | 432 | 17 | 2696 | ATTTATTGCTCACGTCTGTGCCATG | Antisense | 4263 |
| 226043_at | 664 | 1027 | 2705 | TCACGTCTGTGCCATGTTGTCAATG | Antisense | 4264 |
| 226043_at | 534 | 931 | 2719 | TGTTGTCAATGGGTCCTTTCCAACC | Antisense | 4265 |
| 226043_at | 589 | 365 | 2734 | CTTTCCAACCCAAGAGGTACATTTG | Antisense | 4266 |
| 226778_at | 173 | 589 | 1803 | GAAACTCTGGAAATCACGTGTGTGG | Antisense | 4267 |
| 226778_at | 72 | 917 | 1823 | TGTGGGGAGATGGGGACGCTTCCCA | Antisense | 4268 |
| 226778_at | 159 | 841 | 1836 | GGACGCTTCCCATGTTGTGGGGAGC | Antisense | 4269 |
| 226778_at | 1070 | 423 | 1844 | CCCATGTTGTGGGGAGCTCTGTGGC | Antisense | 4270 |
| 226778_at | 1052 | 441 | 1912 | CCTGCAACTCACGTCAATCATAGAA | Antisense | 4271 |
| 226778_at | 262 | 3 | 1936 | ATTGTGACGCACAGTTGGCAAAATA | Antisense | 4272 |
| 226778_at | 13 | 1071 | 1959 | TAGTTCTTTATGCTATTTCTCAAAA | Antisense | 4273 |
| 226778_at | 323 | 657 | 1988 | GAGGACAAACCCAGATTGGGATTGG | Antisense | 4274 |
| 226778_at | 397 | 1159 | 2003 | TTGGGATTGGAATATGCACTGTAAA | Antisense | 4275 |
| 226778_at | 430 | 955 | 2017 | TGCACTGTAAATCAAATTTTTCTTA | Antisense | 4276 |
| 226778_at | 1068 | 915 | 2231 | TGTGTAAACACACAGCTTCCTTGTG | Antisense | 4277 |
| 227035_x_at | 257 | 303 | 809 | CAACATTCTCTTCTCAAACACTGAC | Antisense | 4278 |
| 227035_x_at | 418 | 917 | 898 | TGTGGGTCACAGCAGTGAGCTCCCA | Antisense | 4279 |
| 227035_x_at | 511 | 463 | 920 | CCACCCGCCTTGCAGTGAAGATGTG | Antisense | 4280 |
| 227035_x_at | 83 | 849 | 951 | GGAGAGGGAGTGTCTCCTTCCAGGT | Antisense | 4281 |
| 227035_x_at | 839 | 85 | 972 | AGGTGCTAGCTCTGGACAGCAGCTG | Antisense | 4282 |
| 227035_x_at | 585 | 859 | 1007 | GGAAAGTTTCTTCATCGTTGTCCTC | Antisense | 4283 |
| 227035_x_at | 547 | 445 | 1028 | CCTCCCTGCTGGTCACATGAGTTTA | Antisense | 4284 |
| 227035_x_at | 1000 | 161 | 1052 | ACGATTCCTTAGAAGTGTCTCCCAC | Antisense | 4285 |
| 227035_x_at | 1126 | 633 | 1093 | GAGAATCTCTGAGGCGTGTCTTCCA | Antisense | 4286 |
| 227035_x_at | 881 | 919 | 1133 | TGTGCCCTCCACAGTGTAGACTTGA | Antisense | 4287 |
| 227035_x_at | 87 | 229 | 1157 | AACACTTGGCCTCATGTGATCCTTC | Antisense | 4288 |
| 228376_at | 851 | 823 | 516 | GGTCAGGGGATCAGACACTCCAGTT | Antisense | 4289 |
| 228376_at | 993 | 267 | 560 | AATGGCAAAAGGCTCCATACCCTTC | Antisense | 4290 |
| 228376_at | 1038 | 797 | 620 | GGGAATGATGATAACACCCACTTCA | Antisense | 4291 |
| 228376_at | 1110 | 227 | 632 | AACACCCACTTCATAGAATGGTCAT | Antisense | 4292 |
| 228376_at | 1111 | 741 | 680 | GTCAAGCACTTAGCCTCTGGTGCAC | Antisense | 4293 |
| 228376_at | 872 | 1047 | 714 | TAAATAAGTATACCTATTCCTCCTT | Antisense | 4294 |
| 228376_at | 977 | 21 | 756 | ATATTACCAAATGTCCAGCTTATAC | Antisense | 4295 |
| 228376_at | 868 | 511 | 797 | GCTAGTGGGCTATGTTAGAGCTACT | Antisense | 4296 |
| 228376_at | 693 | 121 | 913 | AGACAGCTGTGTGGGTGTTTTTTGG | Antisense | 4297 |
| 228376_at | 654 | 997 | 947 | TCTGGTTTACAATCTCGTCATTCAA | Antisense | 4298 |
| 228376_at | 229 | 75 | 1034 | AGGCTCATCATTTCTCAGTCTGAAT | Antisense | 4299 |
| 228604_at | 845 | 593 | 622 | GAAATGGTGGTTTCCTTCTGATAAG | Antisense | 4300 |
| 228604_at | 731 | 853 | 656 | GGACCATGTCGCTTATATATCACCC | Antisense | 4301 |
| 228604_at | 1139 | 415 | 665 | CGCTTATATATCACCCTACTAGGGG | Antisense | 4302 |
| 228604_at | 898 | 685 | 689 | GATATAATTTTCCCTTCTAAGCAAG | Antisense | 4303 |
| 228604_at | 313 | 271 | 717 | AATGGCAGTGCTAAATAGTTTTGTA | Antisense | 4304 |
| 228604_at | 299 | 287 | 785 | AATATTTTTCAGATGCATTTGCATT | Antisense | 4305 |
| 228604_at | 637 | 855 | 868 | GGACTGAAATTCTGTTACATGATGT | Antisense | 4306 |
| 228604_at | 585 | 23 | 954 | ATATAAAGCAAATTCACACGTTTTC | Antisense | 4307 |
| 228604_at | 865 | 589 | 1011 | GAAACCTCAGTCTTGAAATTTTGAT | Antisense | 4308 |
| 228604_at | 786 | 219 | 1040 | AAAAATCATGACACTGTTTTACCAT | Antisense | 4309 |
| 228604_at | 882 | 645 | 1071 | GAGTAGCTAACTTTTGGTAACACCT | Antisense | 4310 |
| 228786_at | 359 | 309 | 317 | CACACGCAGATCCTGCACTGTACTG | Antisense | 4311 |
| 228786_at | 819 | 49 | 326 | ATCCTGCACTGTACTGTCCAGTCAA | Antisense | 4312 |
| 228786_at | 1007 | 165 | 338 | ACTGTCCAGTCAACTGACTTCAGCA | Antisense | 4313 |
| 228786_at | 645 | 665 | 365 | GATGTCTGGGTTCAGCAGCGAGTTG | Antisense | 4314 |
| 228786_at | 1099 | 645 | 384 | GAGTTGCTGTGTGAGGCCACCAGAA | Antisense | 4315 |
| 228786_at | 198 | 803 | 494 | GGGAGACATTCAGAATCGAGGCGAA | Antisense | 4316 |
| 228786_at | 807 | 447 | 524 | CCTCAGTGCTCCTCTTGGAGGCAGA | Antisense | 4317 |
| 228786_at | 699 | 767 | 583 | GTGAATGTGGAAGACCAGCAGATTG | Antisense | 4318 |
| 228786_at | 1088 | 785 | 665 | GTGGTGAAGTGGCCCTGCACAAAAC | Antisense | 4319 |
| 228786_at | 679 | 263 | 671 | AAGTGGCCCTGCACAAAACGTTGCT | Antisense | 4320 |
| 228786_at | 332 | 1071 | 817 | TAGTAAAGCTAAGTTTTATCTCTTC | Antisense | 4321 |
| 228812_at | 843 | 637 | 765 | GAGACTTCATTGGTGATACACTCAA | Antisense | 4322 |
| 228812_at | 406 | 775 | 777 | GTGATACACTCAATTTTTACTGGGT | Antisense | 4323 |
| 228812_at | 488 | 509 | 807 | GCTAATAATGTTGGTCACTGTCTCA | Antisense | 4324 |
| 228812_at | 742 | 301 | 869 | CACAAAGCTTTTGGGTAACCAGCGT | Antisense | 4325 |
| 228812_at | 873 | 805 | 881 | GGGTAACCAGCGTTCTTAAATGTAT | Antisense | 4326 |
| 228812_at | 552 | 1075 | 903 | TATGGTTTTTGACCAGGTGAACCCT | Antisense | 4327 |
| 228812_at | 775 | 623 | 913 | GACCAGGTGAACCCTTTAGAAGTGA | Antisense | 4328 |
| 228812_at | 1155 | 199 | 963 | AAATACCTTTGGCTGTGATGAATGT | Antisense | 4329 |
| 228812_at | 1101 | 953 | 981 | TGAATGTAGATCCCAGCAGAATACC | Antisense | 4330 |
| 228812_at | 137 | 1153 | 1021 | TTGACTGAGTATTTGTAGATGCTTA | Antisense | 4331 |
| 228812_at | 198 | 259 | 1091 | AAGTTCTCAGGTACTGTTCAATTAT | Antisense | 4332 |
| 229598_at | 248 | 15 | 566 | ATTTTTCTTAGCTAAATCTGGCAAC | Antisense | 4333 |
| 229598_at | 573 | 133 | 636 | AGCAGAATCTGCCATATGAGTAATA | Antisense | 4334 |
| 229598_at | 259 | 649 | 653 | GAGTAATAGAAGTGAGCAGGCCCAG | Antisense | 4335 |
| 229598_at | 304 | 335 | 675 | CAGGACTCCCTAAGTCAAGAAACCA | Antisense | 4336 |
| 229598_at | 19 | 121 | 692 | AGAAACCAAGAGGCGTCATTACGGA | Antisense | 4337 |
| 229598_at | 549 | 209 | 717 | AAAGAGTAACTCACCCTGTGTGCTC | Antisense | 4338 |
| 229598_at | 90 | 143 | 759 | AGCGATGCCCCCATGTTATGAATGG | Antisense | 4339 |
| 229598_at | 747 | 859 | 784 | GGAAAAGTTCACTGAAGGGTTCATA | Antisense | 4340 |
| 229598_at | 796 | 1161 | 846 | TTGGATACCTTCAAGGGATCAGAAA | Antisense | 4341 |
| 229598_at | 394 | 1017 | 899 | TCATCATTACTCTCTACATTATTAT | Antisense | 4342 |
| 229598_at | 448 | 1109 | 983 | TTTTAACTTGTCTGCATGTTTGAAA | Antisense | 4343 |
| 231229_at | 843 | 533 | 31 | GCACGTCCAAGGTGATCCTGAGGGC | Antisense | 4344 |
| 231229_at | 969 | 317 | 96 | CACCCTGAAGAAGGCTGTTTCCACC | Antisense | 4345 |
| 231229_at | 999 | 605 | 130 | GACATGGCCCGAAATGCCTATCACT | Antisense | 4346 |
| 231229_at | 632 | 477 | 145 | GCCTATCACTTCAAGCGTGTGCTCA | Antisense | 4347 |
| 231229_at | 105 | 389 | 247 | CTCCAAGTCCAAGCTCAAGGTCAAG | Antisense | 4348 |
| 231229_at | 658 | 603 | 315 | GACAGCACAGGTCACTACTGGGCTC | Antisense | 4349 |
| 231229_at | 453 | 1057 | 330 | TACTGGGCTCCAAACAGGGGCACAA | Antisense | 4350 |
| 231229_at | 908 | 293 | 352 | CAAGCGGCTTATCAAGGGGGTTCGA | Antisense | 4351 |
| 231229_at | 961 | 803 | 369 | GGGTTCGAAGGGTGGCCAAGTGCCA | Antisense | 4352 |
| 231229_at | 847 | 59 | 403 | ATGAGGCAGGCCAGGCAAGCAGTCA | Antisense | 4353 |
| 231229_at | 1130 | 419 | 441 | CGCCATTGGCTCAGTGCAGTGGGAA | Antisense | 4354 |
| 232019_at | 931 | 445 | 1508 | CCTCGGCTCCTCATCTGAAGAGAAG | Antisense | 4355 |
| 232019_at | 1103 | 1041 | 1540 | TAACTGCTAAGTTGCTCTGGCTCTA | Antisense | 4356 |
| 232019_at | 521 | 1149 | 1551 | TTGCTCTGGCTCTAATGTTTCATGA | Antisense | 4357 |
| 232019_at | 725 | 973 | 1645 | TGCCACATCTGGCCATACCAAATCC | Antisense | 4358 |
| 232019_at | 813 | 149 | 1661 | ACCAAATCCATCGCATGCTTCAGGA | Antisense | 4359 |
| 232019_at | 447 | 593 | 1684 | GAAAGGGAGGGGATGCTGTGACAGC | Antisense | 4360 |
| 232019_at | 51 | 635 | 1738 | GAGAAAGGGCAAGTCCCTCGTGGTC | Antisense | 4361 |
| 232019_at | 114 | 421 | 1777 | CCCAAGCACCTCGATAACCAGTGGC | Antisense | 4362 |
| 232019_at | 717 | 887 | 1841 | GGCGCCCAGTGACAGACAAGACAGC | Antisense | 4363 |
| 232019_at | 650 | 141 | 1874 | AGCTGGGGCAGCCCTGGCTAAAGGA | Antisense | 4364 |
| 232019_at | 231 | 383 | 1928 | CTCTGCCTCTGAATGCATTCCAAGA | Antisense | 4365 |
| 232311_at | 229 | 181 | 2003 | ACATACCTTGGGTTGATCCACTTAG | Antisense | 4366 |
| 232311_at | 757 | 675 | 2017 | GATCCACTTAGGAACCTCAGATAAT | Antisense | 4367 |
| 232311_at | 930 | 231 | 2042 | AACATCTGCCACGTATAGAGCAATT | Antisense | 4368 |
| 232311_at | 444 | 1071 | 2069 | TATGTCCCAGGCACTCTACTAGACA | Antisense | 4369 |
| 232311_at | 999 | 371 | 2084 | CTACTAGACACTTCATACAGTTTAG | Antisense | 4370 |
| 232311_at | 33 | 811 | 2119 | GGGTGTAGATCAAGGCAGGAGCAGG | Antisense | 4371 |
| 232311_at | 387 | 667 | 2220 | GATGGGGGCTATTATGAACTGAGAA | Antisense | 4372 |
| 232311_at | 683 | 1159 | 2264 | TTGGGGCCAAATCATGTAGACTCTT | Antisense | 4373 |
| 232311_at | 543 | 1067 | 2280 | TAGACTCTTGAGTGATGTGTTAAGG | Antisense | 4374 |
| 232311_at | 137 | 869 | 2303 | GGAATGCTATGAGTGCTGAGAGGGC | Antisense | 4375 |
| 232311_at | 1085 | 521 | 2326 | GCATCAGAAGTCCTTGAGAGCCTCC | Antisense | 4376 |
| 235391_at | 477 | 17 | 281 | ATTTCACGGCAAAGCTTTAGAGGTC | Antisense | 4377 |
| 235391_at | 482 | 1101 | 296 | TTTAGAGGTCTACACTGCTGCCTAC | Antisense | 4378 |
| 235391_at | 458 | 1051 | 306 | TACACTGCTGCCTACCAGAATATAC | Antisense | 4379 |
| 235391_at | 862 | 289 | 369 | AATTCTCTGTATGCACCAGATTATT | Antisense | 4380 |
| 235391_at | 758 | 541 | 417 | GCAAATTCAAAGTCACCTCTTCAGA | Antisense | 4381 |
| 235391_at | 16 | 155 | 431 | ACCTCTTCAGAGATCACTGTCAGCT | Antisense | 4382 |
| 235391_at | 439 | 167 | 446 | ACTGTCAGCTAAGTGTGTATCTGGA | Antisense | 4383 |
| 235391_at | 569 | 185 | 476 | ACAGGTATCCACTTGTCGACTAAGA | Antisense | 4384 |
| 235391_at | 29 | 1123 | 565 | TTAAGTAAACTACACATTTCCATTT | Antisense | 4385 |
| 235391_at | 985 | 579 | 630 | GAACTTTATACTCACTTTGCTATGT | Antisense | 4386 |
| 235391_at | 369 | 245 | 656 | AAGCCTCAAAGTGAAGTCCAACTGG | Antisense | 4387 |
| 235421_at | 755 | 29 | 109 | ATACCTTCACAATCTGAACTTTCTC | Antisense | 4388 |
| 235421_at | 770 | 579 | 124 | GAACTTTCTCTAGATGGGCACAGAT | Antisense | 4389 |
| 235421_at | 627 | 95 | 201 | AGTGCTGAGGCTTTTTGCAGGCGCA | Antisense | 4390 |
| 235421_at | 682 | 957 | 216 | TGCAGGCGCAGTTAGCAGGCGAACT | Antisense | 4391 |
| 235421_at | 1114 | 883 | 233 | GGCGAACTGGTCAGCAGGGTTTCTG | Antisense | 4392 |
| 235421_at | 1015 | 409 | 263 | CGTAGATTTGCGTGACAGGGGCCCT | Antisense | 4393 |
| 235421_at | 1142 | 337 | 278 | CAGGGGCCCTGTGTTGCTAAGGAAT | Antisense | 4394 |
| 235421_at | 900 | 223 | 319 | AAAAGTCTCAGCGTCAGACACTCCT | Antisense | 4395 |
| 235421_at | 849 | 449 | 376 | CCTTTCCAGGCAACTCACAGTTTAG | Antisense | 4396 |
| 235421_at | 331 | 697 | 408 | GTTGTGTGTGTTCAAGCTCTTGGGT | Antisense | 4397 |
| 235421_at | 1103 | 231 | 477 | AACATCTTGTCTTACAGCTCTTTTA | Antisense | 4398 |
| 235473_at | 89 | 859 | 256 | GGAAATCAAGATCTGCGTGCTGGGT | Antisense | 4399 |
| 235473_at | 467 | 493 | 270 | GCGTGCTGGGTATGTTCATTGCTAC | Antisense | 4400 |
| 235473_at | 253 | 961 | 306 | TGCTTCTAGGCCTTTTCAACTGACA | Antisense | 4401 |
| 235473_at | 335 | 221 | 347 | AAAACTCATTGTAATCGTGTAACTT | Antisense | 4402 |
| 235473_at | 854 | 175 | 391 | ACTTTGCTAGTACCCCAGAAGCTCC | Antisense | 4403 |
| 235473_at | 385 | 1109 | 433 | TTTTAACGCTTAATCACCTTCATCC | Antisense | 4404 |
| 235473_at | 1120 | 319 | 447 | CACCTTCATCCTCAGTTTTATGGTA | Antisense | 4405 |
| 235473_at | 773 | 1115 | 464 | TTATGGTAATCACTTGTCTTTGCAG | Antisense | 4406 |
| 235473_at | 199 | 751 | 479 | GTCTTTGCAGTTTTAGTCTGTAACC | Antisense | 4407 |
| 235473_at | 884 | 1071 | 492 | TAGTCTGTAACCATGCATCCCTAAA | Antisense | 4408 |
| 235473_at | 676 | 177 | 583 | ACTTCTTTTATGTCTGTGATGTTCA | Antisense | 4409 |
| 235688_s_at | 55 | 939 | 27 | TGAGGCAGTGCATGTTCTTGGCCCA | Antisense | 4410 |
| 235688_s_at | 722 | 895 | 45 | TGGCCCAGAGTAAGTGCTTAGTGAA | Antisense | 4411 |
| 235688_s_at | 52 | 91 | 64 | AGTGAATGCTTTCTAACTCCGAACC | Antisense | 4412 |
| 235688_s_at | 1104 | 809 | 108 | GGGTGTTGAGCAAAAGGGGCCTTCA | Antisense | 4413 |
| 235688_s_at | 1084 | 813 | 123 | GGGGCCTTCAAGATGTTCAAGGCAC | Antisense | 4414 |
| 235688_s_at | 178 | 891 | 186 | GGCCTCAGTGGGTGCATGTGATTAT | Antisense | 4415 |
| 235688_s_at | 45 | 935 | 204 | TGATTATCCACGTTTCACCTATGAA | Antisense | 4416 |
| 235688_s_at | 773 | 601 | 276 | GACAGGGCCTCGATTCTGTTTTAAA | Antisense | 4417 |
| 235688_s_at | 678 | 739 | 290 | TCTGTTTTAAACTCCAGTAGTCCCT | Antisense | 4418 |
| 235688_s_at | 1024 | 443 | 396 | CCTCCATTACCGTCACTGGTGAAAT | Antisense | 4419 |
| 235688_s_at | 1100 | 165 | 410 | ACTGGTGAAATGCGGCTCACCTCCC | Antisense | 4420 |
| 236203_at | 84 | 63 | 21 | ATGTCAGGTTTGTACCTACCACATT | Antisense | 4421 |
| 236203_at | 116 | 873 | 107 | GGCACATAGTAAGTAGTCGATAGGT | Antisense | 4422 |
| 236203_at | 194 | 3 | 148 | ATTGTTATTTTCTGGAGTCCAACTA | Antisense | 4423 |
| 236203_at | 963 | 647 | 162 | GAGTCCAACTAACAAATCCCACAGT | Antisense | 4424 |
| 236203_at | 211 | 203 | 175 | AAATCCCACAGTGAATGACATCACA | Antisense | 4425 |
| 236203_at | 87 | 803 | 200 | GGGATGCAACCAACAAGATCCAGAA | Antisense | 4426 |
| 236203_at | 252 | 177 | 232 | ACTTCTACTAGATAAACAACTCCAT | Antisense | 4427 |
| 236203_at | 12 | 683 | 242 | GATAAACAACTCCATTTCTTCAGCA | Antisense | 4428 |
| 236203_at | 472 | 573 | 326 | GAACCAAATTTGTATGAGGCAATCA | Antisense | 4429 |
| 236203_at | 990 | 221 | 353 | AAAACTGACACCGACTGTATTAAGG | Antisense | 4430 |
| 236203_at | 919 | 59 | 401 | ATGAGATTGCTGTTATGTTTTCTAA | Antisense | 4431 |
| 236627_at | 256 | 235 | 92 | AACTAGATTTTTGACCCTCACTCAT | Antisense | 4432 |
| 236627_at | 901 | 367 | 121 | CTTTCCTTGCTATAGACATGCTTTG | Antisense | 4433 |
| 236627_at | 995 | 119 | 134 | AGACATGCTTTGCATACCCAGCTTC | Antisense | 4434 |
| 236627_at | 1111 | 1133 | 156 | TTCTAGCCACATCTTCCCTAAGAAA | Antisense | 4435 |
| 236627_at | 190 | 839 | 230 | GGATCTGCATGTTGTCAGCTACCTA | Antisense | 4436 |
| 236627_at | 326 | 697 | 240 | GTTGTCAGCTACCTAAAGCAGCAAA | Antisense | 4437 |
| 236627_at | 400 | 1045 | 281 | TAAAATCAGGGAACCTTGCAGTTTA | Antisense | 4438 |
| 236627_at | 701 | 243 | 292 | AACCTTGCAGTTTAAGGCACACCTT | Antisense | 4439 |
| 236627_at | 1156 | 1101 | 329 | TTTAATCCTTCAATGCATCCAGCCA | Antisense | 4440 |
| 236627_at | 1062 | 979 | 334 | TCCTTCAATGCATCCAGCCAAAACA | Antisense | 4441 |
| 236627_at | 149 | 1063 | 375 | TACCATCCATCAATGCAAGGTTTTT | Antisense | 4442 |
| 236681_at | 179 | 589 | 250 | GAAACTCATGTGTCCTCATGGATCG | Antisense | 4443 |
| 236681_at | 133 | 343 | 266 | CATGGATCGTGGATGCCTTCATTTC | Antisense | 4444 |
| 236681_at | 1146 | 1021 | 326 | TCAGTAGAGTGACCCGCGGATGGCA | Antisense | 4445 |
| 236681_at | 447 | 69 | 345 | ATGGCATAAATGCACCTCCTTTTCT | Antisense | 4446 |
| 236681_at | 729 | 1015 | 367 | TCTTGGCCTTGGATCTATGGGTCTG | Antisense | 4447 |
| 236681_at | 409 | 835 | 392 | GGATTGTGGTCATCTCCTCAATCCT | Antisense | 4448 |
| 236681_at | 882 | 501 | 426 | GCTGAATCAATGTGGCCGTGGGTGG | Antisense | 4449 |
| 236681_at | 121 | 889 | 439 | GGCCGTGGGTGGGAACTTACATACA | Antisense | 4450 |
| 236681_at | 896 | 613 | 482 | GACTGTCTAAACAAGGGGGCCTCGC | Antisense | 4451 |
| 236681_at | 1013 | 789 | 498 | GGGCCTCGCATGGAGCTGTAAAGCA | Antisense | 4452 |
| 236681_at | 522 | 805 | 669 | GGGATACATGGGCAGTGCTTCAGAC | Antisense | 4453 |
| 237439_at | 392 | 1087 | 20 | TATTTTTAATGCCTTTTCCTGGGAT | Antisense | 4454 |
| 237439_at | 5 | 1109 | 23 | TTTTAATGCCTTTTCCTGGGATAAG | Antisense | 4455 |
| 237439_at | 800 | 1125 | 25 | TTAATGCCTTTTCCTGGGATAAGCA | Antisense | 4456 |
| 237439_at | 191 | 53 | 28 | ATGCCTTTTCCTGGGATAAGCATTA | Antisense | 4457 |
| 237439_at | 434 | 477 | 30 | GCCTTTTCCTGGGATAAGCATTAAA | Antisense | 4458 |
| 237439_at | 279 | 685 | 87 | GATAGTGATGGTAAGGCAAGATTCT | Antisense | 4459 |
| 237439_at | 478 | 665 | 93 | GATGGTAAGGCAAGATTCTAGCAAA | Antisense | 4460 |
| 237439_at | 1063 | 869 | 101 | GGCAAGATTCTAGCAAAGAGAGATG | Antisense | 4461 |
| 237439_at | 636 | 641 | 118 | GAGAGATGGGAGATAAATGGCTGAG | Antisense | 4462 |
| 237439_at | 44 | 803 | 125 | GGGAGATAAATGGCTGAGAGTTCAG | Antisense | 4463 |
| 237439_at | 29 | 271 | 133 | AATGGCTGAGAGTTCAGGTGAATAT | Antisense | 4464 |
| 238925_at | 156 | 875 | 317 | GGCAGCAGTGGCATGGACAAGCAAC | Antisense | 4465 |
| 238925_at | 1030 | 129 | 336 | AGCAACTGCTAATTCGAGACTTACT | Antisense | 4466 |
| 238925_at | 768 | 415 | 350 | CGAGACTTACTATTGGCTTCACAGC | Antisense | 4467 |
| 238925_at | 577 | 309 | 369 | CACAGCACACCCTACAGTGAGCAGG | Antisense | 4468 |
| 238925_at | 594 | 57 | 397 | ATGAGACCGTGGAACAGCTACCTGC | Antisense | 4469 |
| 238925_at | 4 | 863 | 407 | GGAACAGCTACCTGCTTTTGGTTAA | Antisense | 4470 |
| 238925_at | 122 | 57 | 493 | ATGAACTCAGCTTGTTTTTCCTAAT | Antisense | 4471 |
| 238925_at | 315 | 289 | 578 | AATTAGCACAGTCCCTGGATCTCAA | Antisense | 4472 |
| 238925_at | 731 | 1153 | 674 | TTGATTGATCAAGAGTGCCACGGAA | Antisense | 4473 |
| 238925_at | 191 | 811 | 717 | GGGTGGAGGAGGGTGTCACTTCAGA | Antisense | 4474 |
| 238925_at | 1109 | 923 | 730 | TGTCACTTCAGATGGGGCAGGCACA | Antisense | 4475 |
| 239486_at | 540 | 1043 | 156 | TAAAGTTGGGCAGTAATCTTAATTA | Antisense | 4476 |
| 239486_at | 1024 | 929 | 224 | TGTTTTACAACTAGAACCTGCCCTA | Antisense | 4477 |
| 239486_at | 21 | 1067 | 235 | TAGAACCTGCCCTAAATGTTGAATA | Antisense | 4478 |
| 239486_at | 826 | 273 | 249 | AATGTTGAATATCTTCCTAGCAAGA | Antisense | 4479 |
| 239486_at | 754 | 359 | 261 | CTTCCTAGCAAGAAACAGTCTGTCA | Antisense | 4480 |
| 239486_at | 374 | 335 | 276 | CAGTCTGTCATTTTACTTACACGAT | Antisense | 4481 |
| 239486_at | 1134 | 171 | 290 | ACTTACACGATGTCTAACCAAACCA | Antisense | 4482 |
| 239486_at | 871 | 745 | 301 | GTCTAACCAAACCATAACTTTACAT | Antisense | 4483 |
| 239486_at | 37 | 1053 | 321 | TACATAAACTAGTCGTTTCGGTCAA | Antisense | 4484 |
| 239486_at | 933 | 619 | 467 | GACCCCTGAGTACCATTAATATTCC | Antisense | 4485 |
| 239486_at | 874 | 631 | 543 | GAGCAGCCATTATGAAATCTCACAA | Antisense | 4486 |
| 241670_x_at | 852 | 1147 | 93 | TTGCCTGCGGAGCACGGGTGGGCAT | Antisense | 4487 |
| 241670_x_at | 862 | 969 | 94 | TGCCTGCGGAGCACGGGTGGGCATT | Antisense | 4488 |
| 241670_x_at | 1033 | 391 | 97 | CTGCGGAGCACGGGTGGGCATTGGA | Antisense | 4489 |
| 241670_x_at | 173 | 851 | 101 | GGAGCACGGGTGGGCATTGGATGTA | Antisense | 4490 |
| 241670_x_at | 1085 | 535 | 104 | GCACGGGTGGGCATTGGATGTAAGG | Antisense | 4491 |
| 241670_x_at | 856 | 813 | 109 | GGTGGGCATTGGATGTAAGGTATTC | Antisense | 4492 |
| 241670_x_at | 659 | 903 | 118 | TGGATGTAAGGTATTCCTAACTTCC | Antisense | 4493 |
| 241670_x_at | 418 | 849 | 333 | GGAGACGGCAGGAGCAGCTCAGGTA | Antisense | 4494 |
| 241670_x_at | 212 | 851 | 343 | GGAGCAGCTCAGGTAACCAGGGGAA | Antisense | 4495 |
| 241670_x_at | 953 | 533 | 346 | GCAGCTCAGGTAACCAGGGGAAGCT | Antisense | 4496 |
| 241670_x_at | 479 | 825 | 354 | GGTAACCAGGGGAAGCTTGCGTGCC | Antisense | 4497 |
| 241671_x_at | 579 | 1 | 28 | ATTCTGAAGCCAGACCGTCTTTCCT | Antisense | 4498 |
| 241671_x_at | 716 | 993 | 223 | TCGCAGCTGGGCGAGGGGACTTGGA | Antisense | 4499 |
| 241671_x_at | 861 | 403 | 229 | CTGGGCGAGGGGACTTGGAGGACAG | Antisense | 4500 |
| 241671_x_at | 555 | 813 | 237 | GGGGACTTGGAGGACAGGGTGAAGC | Antisense | 4501 |
| 241671_x_at | 958 | 177 | 241 | ACTTGGAGGACAGGGTGAAGCTGCA | Antisense | 4502 |
| 241671_x_at | 834 | 951 | 256 | TGAAGCTGCAGAAGACCTGGGGTGG | Antisense | 4503 |
| 241671_x_at | 1116 | 501 | 260 | GCTGCAGAAGACCTGGGGTGGGATG | Antisense | 4504 |
| 241671_x_at | 425 | 1067 | 287 | TAGAGAGGACGCCAAGGACTGGGGA | Antisense | 4505 |
| 241671_x_at | 19 | 113 | 290 | AGAGGACGCCAAGGACTGGGGAAGG | Antisense | 4506 |
| 241671_x_at | 516 | 865 | 315 | GGAAGTTAGGAATACCTTACATCCA | Antisense | 4507 |
| 241671_x_at | 536 | 75 | 322 | AGGAATACCTTACATCCAATGCCCA | Antisense | 4508 |
| 243010_at | 200 | 597 | 608 | GAAATACACCCACTCTCTTGGAATA | Antisense | 4509 |
| 243010_at | 1151 | 57 | 633 | ATGACGTACCACTCAGTTGGACCCT | Antisense | 4510 |
| 243010_at | 856 | 619 | 652 | GACCCTCAAGAGTCACTGCTTTGTC | Antisense | 4511 |
| 243010_at | 506 | 417 | 704 | CGCACGCTTCCATTTGATGCATTTG | Antisense | 4512 |
| 243010_at | 1129 | 63 | 753 | ATGTCATTGTCCTTGAGACCCTACA | Antisense | 4513 |
| 243010_at | 296 | 639 | 767 | GAGACCCTACATGTGCAGTTTGGCT | Antisense | 4514 |
| 243010_at | 825 | 1097 | 840 | TTTCCTGCAGGCTTTTCCATGAGTA | Antisense | 4515 |
| 243010_at | 970 | 579 | 879 | GAACAAATCTGTATGGCTTTTCCCC | Antisense | 4516 |
| 243010_at | 483 | 767 | 943 | GTGAACTTGTCCTAGTATGCTTGCC | Antisense | 4517 |
| 243010_at | 1033 | 357 | 962 | CTTGCCTCACAAACGTTTTAGCCAT | Antisense | 4518 |
| 243010_at | 136 | 365 | 1119 | CTTAGCCTGACAGTGTCCTGTTCTC | Antisense | 4519 |
| 243502_at | 43 | 1127 | 166 | TTAATTTCTGTGAAGAGTGCCCCTG | Antisense | 4520 |
| 243502_at | 320 | 777 | 232 | GTGTCTGGATAACGCGTCAGCTTCT | Antisense | 4521 |
| 243502_at | 1061 | 679 | 239 | GATAACGCGTCAGCTTCTTAAAGTA | Antisense | 4522 |
| 243502_at | 865 | 1111 | 318 | TTATTCTCTTGCTAAAGTTGTAATT | Antisense | 4523 |
| 243502_at | 74 | 129 | 349 | AGAATTTTCCAGCTCTAACTGCCTT | Antisense | 4524 |
| 243502_at | 947 | 323 | 358 | CAGCTCTAACTGCCTTCTTAGTACA | Antisense | 4525 |
| 243502_at | 711 | 391 | 367 | CTGCCTTCTTAGTACATGTCTTTCT | Antisense | 4526 |
| 243502_at | 636 | 1133 | 372 | TTCTTAGTACATGTCTTTCTGCCTT | Antisense | 4527 |
| 243502_at | 218 | 367 | 386 | CTTTCTGCCTTTGAAGCATATGAGT | Antisense | 4528 |
| 243502_at | 401 | 941 | 406 | TGAGTTTGCCAAAGTCATTCTCCCC | Antisense | 4529 |
| 243502_at | 369 | 431 | 427 | CCCCTAATGACATATTGTGGACTTA | Antisense | 4530 |
| 244393_x_at | 880 | 421 | 132 | CCCAGCCGCTATAACTTTTAACAAT | Antisense | 4531 |
| 244393_x_at | 314 | 197 | 152 | ACAATTCCCATATGTCCTTTATTCC | Antisense | 4532 |
| 244393_x_at | 700 | 1077 | 162 | TATGTCCTTTATTCCACTAAGATGA | Antisense | 4533 |
| 244393_x_at | 464 | 59 | 183 | ATGAGTGCAGTATATATTTCCATCT | Antisense | 4534 |
| 244393_x_at | 489 | 23 | 196 | ATATTTCCATCTGTCCAAGGCTTCC | Antisense | 4535 |
| 244393_x_at | 796 | 795 | 270 | GGGCATTTGGGGAATCCAGGCTGTG | Antisense | 4536 |
| 244393_x_at | 1140 | 455 | 285 | CCAGGCTGTGATTCAGGGAAGTTCC | Antisense | 4537 |
| 244393_x_at | 597 | 257 | 303 | AAGTTCCAAGTGTCTGATGAAGTGT | Antisense | 4538 |
| 244393_x_at | 722 | 1155 | 328 | TTGTTTTACATCTTTGTGTCCCTTG | Antisense | 4539 |
| 244393_x_at | 247 | 453 | 348 | CCTTGCAGGTCTAGCACTGTGCTAT | Antisense | 4540 |
| 244393_x_at | 748 | 765 | 366 | GTGCTATGTAGGTAACATGTGCTCC | Antisense | 4541 |
| 91684_g_at | 134 | 141 | 67 | AGCTGCGCAAGATCCAGGCGCGGAT | Antisense | 4542 |
| 91684_g_at | 213 | 1139 | 99 | TTCGCGCAGGCTGACGGCTCGGCCT | Antisense | 4543 |
| 91684_g_at | 505 | 993 | 100 | TCGCGCAGGCTGACGGCTCGGCCTA | Antisense | 4544 |
| 91684_g_at | 811 | 341 | 105 | CAGGCTGACGGCTCGGCCTACATTG | Antisense | 4545 |
| 91684_g_at | 235 | 617 | 111 | GACGGCTCGGCCTACATTGAGCAGG | Antisense | 4546 |
| 91684_g_at | 776 | 383 | 116 | CTCGGCCTACATTGAGCAGGGCAAC | Antisense | 4547 |
| 91684_g_at | 67 | 449 | 121 | CCTACATTGAGCAGGGCAACACCAA | Antisense | 4548 |
| 91684_g_at | 114 | 3 | 126 | ATTGAGCAGGGCAACACCAAGGCAC | Antisense | 4549 |
| 91684_g_at | 765 | 629 | 129 | GAGCAGGGCAACACCAAGGCACTGG | Antisense | 4550 |
| 91684_g_at | 797 | 89 | 133 | AGGGCAACACCAAGGCACTGGCTGT | Antisense | 4551 |
| 91684_g_at | 1129 | 301 | 137 | CAACACCAAGGCACTGGCTGTGGTC | Antisense | 4552 |
| 91684_g_at | 769 | 189 | 139 | ACACCAAGGCACTGGCTGTGGTCTA | Antisense | 4553 |
| 91684_g_at | 976 | 295 | 143 | CAAGGCACTGGCTGTGGTCTACGGC | Antisense | 4554 |
| 91684_g_at | 319 | 75 | 145 | AGGCACTGGCTGTGGTCTACGGCCC | Antisense | 4555 |
| 91684_g_at | 1101 | 537 | 147 | GCACTGGCTGTGGTCTACGGCCCGC | Antisense | 4556 |
| 91684_g_at | 415 | 165 | 149 | ACTGGCTGTGGTCTACGGCCCGCAC | Antisense | 4557 |

TABLE 17
105 PS gene list probe sequences

| | | | | | | |
|---|---|---|---|---|---|---|
| | | | Probe | | | |
| Probe Set | | | Interrogation | | Target | |
| Name | Probe.X | Probe.Y | Position | Probe Sequence | Strandedness | SEQ ID NO: |

| | | | | | | |
|---|---|---|---|---|---|---|
| 1555852_at | 9 | 453 | 729 | CCATTCTGAGTACTTCTCCGCAAAC | Antisense | 4558 |
| 1555852_at | 567 | 615 | 770 | GACTGTTTTACATGAAGGGTGCAAA | Antisense | 4559 |
| 1555852_at | 99 | 1 | 811 | GAACCCTAGGGTGAAACACGTGACA | Antisense | 4560 |
| 1555852_at | 208 | 1089 | 849 | TATTGAATAGTCCTCTTCTCTACCC | Antisense | 4561 |
| 1555852_at | 446 | 255 | 926 | AAGAGATGAGCATTCAAGTCAGGCA | Antisense | 4562 |
| 1555852_at | 412 | 955 | 955 | TGAATTTGGGTCAAGGCTGCGCCAC | Antisense | 4563 |
| 1555852_at | 132 | 75 | 968 | AGGCTGCGCCACTCAAAAGCTATAT | Antisense | 4564 |
| 1555852_at | 158 | 25 | 989 | ATATGACCTCTATATGAGCAGCTTA | Antisense | 4565 |
| 1555852_at | 1121 | 1087 | 1012 | TATTCAACCTCTTTTAACCTCCATT | Antisense | 4566 |
| 1555852_at | 341 | 243 | 1027 | AACCTCCATTTTGTCATCTGTAGAA | Antisense | 4567 |
| 1555852_at | 310 | 1049 | 1058 | TAAATGCCTAGCTCAGAAGGATTCC | Antisense | 4568 |
| 1556340_at | 322 | 987 | 2212 | TCCCCCCTGGACAACTGTATACCCA | Antisense | 4569 |
| 1556340_at | 615 | 927 | 2227 | TGTATACCCAAGACAGTCCCCAGGG | Antisense | 4570 |
| 1556340_at | 78 | 723 | 2228 | GTATACCCAAGACAGTCCCCAGGGC | Antisense | 4571 |
| 1556340_at | 990 | 29 | 2230 | ATACCCAAGACAGTCCCCAGGGCCT | Antisense | 4572 |
| 1556340_at | 626 | 1039 | 2278 | TAAGCAGTCCAGACTCCAACCCCAA | Antisense | 4573 |
| 1556340_at | 830 | 807 | 2309 | GGGTCCATCATCCCCTATACCAGGG | Antisense | 4574 |
| 1556340_at | 947 | 793 | 2332 | GGGCTATCCCCTCAACTTGGAGGGC | Antisense | 4575 |
| 1556340_at | 229 | 881 | 2333 | GGCTATCCCCTCAACTTGGAGGGCT | Antisense | 4576 |
| 1556340_at | 1080 | 511 | 2334 | GCTATCCCCTCAACTTGGAGGGCTG | Antisense | 4577 |
| 1556340_at | 679 | 1079 | 2336 | TATCCCCTCAACTTGGAGGGCTGGC | Antisense | 4578 |
| 1556340_at | 871 | 425 | 2340 | CCCTCAACTTGGAGGGCTGGCCAAA | Antisense | 4579 |
| 1558034_s_at | 146 | 349 | 661 | CATCTACCCTGATAACACCACAGAT | Antisense | 4580 |
| 1558034_s_at | 344 | 51 | 711 | ATCCAGGAGAGCAGTATACATACAT | Antisense | 4581 |
| 1558034_s_at | 1145 | 31 | 726 | ATACATACATGTTGCTTGCCACTGA | Antisense | 4582 |
| 1558034_s_at | 808 | 769 | 785 | GTGACTAGGATTTACCATTCCCACA | Antisense | 4583 |
| 1558034_s_at | 12 | 355 | 800 | CATTCCCACATTGATGCTCCAAAAG | Antisense | 4584 |
| 1558034_s_at | 904 | 673 | 812 | GATGCTCCAAAAGATATTGCCTCAG | Antisense | 4585 |
| 1558034_s_at | 916 | 685 | 824 | GATATTGCCTCAGGACTCATCGGAC | Antisense | 4586 |
| 1558034_s_at | 456 | 377 | 839 | CTCATCGGACCTTTAATAATCTGTA | Antisense | 4587 |
| 1558034_s_at | 605 | 55 | 938 | ATGAAAATTTCAGCTGGTACCTAGA | Antisense | 4588 |
| 1558034_s_at | 328 | 221 | 973 | AAAACCTACTGCTCAGAACCAGAGA | Antisense | 4589 |
| 1558034_s_at | 7 | 683 | 1055 | GATACACTTTTGGAAGTCTCCCAGG | Antisense | 4590 |
| 1558290_a_at | 734 | 1111 | 2386 | TTTTGCATGTCTGACACCCATGACT | Antisense | 4591 |
| 1558290_a_at | 952 | 159 | 2432 | ACCCAGAAGCAATTCAGCCCAACAG | Antisense | 4592 |
| 1558290_a_at | 693 | 11 | 2443 | ATTCAGCCCAACAGGAGGACAGCTT | Antisense | 4593 |
| 1558290_a_at | 1152 | 659 | 2457 | GAGGACAGCTTCAACCCATTACGAT | Antisense | 4594 |
| 1558290_a_at | 483 | 1031 | 2467 | TCAACCCATTACGATTTCATCTCTG | Antisense | 4595 |
| 1558290_a_at | 605 | 13 | 2474 | ATTACGATTTCATCTCTGCCCCAAC | Antisense | 4596 |
| 1558290_a_at | 22 | 133 | 2504 | AGCAGCAAGCACCTGTTACCTGTCC | Antisense | 4597 |
| 1558290_a_at | 127 | 425 | 2552 | GCCTTTGAAAAATCCCTAACCTATG | Antisense | 4598 |
| 1558290_a_at | 104 | 203 | 2561 | AAATCCCTAACCTATGAGCTTTGAA | Antisense | 4599 |
| 1558290_a_at | 1127 | 425 | 2565 | CCCTAACCTATGAGCTTTGAATAAG | Antisense | 4600 |
| 1558290_a_at | 1011 | 109 | 2588 | AGATGAGTACGAACTTCATCGCCCA | Antisense | 4601 |
| 1559263_s_at | 319 | 517 | 5323 | GCTTCCTTTGAGAACAAGTTTGAGT | Antisense | 4602 |
| 1559263_s_at | 187 | 213 | 5361 | AAAGCTGTTTTATTTGATTCACTGT | Antisense | 4603 |
| 1559263_s_at | 693 | 499 | 5364 | GCTGTTTTATTTGATTCACTGTGAA | Antisense | 4604 |
| 1559263_s_at | 4 | 223 | 5407 | AAAAGTGAAAACACAGCACATTTCA | Antisense | 4605 |
| 1559263_s_at | 8 | 539 | 5422 | GCACATTTCAAGTGTAATCCCCTTT | Antisense | 4606 |
| 1559263_s_at | 1137 | 1123 | 5428 | TTCAAGTGTAATCCCCTTTGGAATT | Antisense | 4607 |
| 1559263_s_at | 1109 | 259 | 5459 | AAGTCTTAGTATATGTCTTTGTGAC | Antisense | 4608 |
| 1559263_s_at | 300 | 751 | 5473 | GTCTTTGTGACAGAAAAACATAGAT | Antisense | 4609 |
| 1559263_s_at | 900 | 65 | 5496 | ATGGGACAGGTAAATGAAATGTTCC | Antisense | 4610 |
| 1559263_s_at | 946 | 593 | 5511 | GAAATGTTCCTAGTTGCATAGCTGT | Antisense | 4611 |
| 1559263_s_at | 647 | 701 | 5516 | GTTCCTAGTTGCATAGCTGTTAACC | Antisense | 4612 |
| 1559584_a_at | 971 | 7 | 2313 | ATTCCTGGGCTCGAGAGAGCCACTC | Antisense | 4613 |
| 1559584_a_at | 263 | 775 | 2412 | GTGATTTTGCCATATTAGTTTACCA | Antisense | 4614 |
| 1559584_a_at | 986 | 1095 | 2417 | TTTGCCATATTAGTTTACCATCTGT | Antisense | 4615 |
| 1559584_a_at | 183 | 715 | 2429 | GTTTACCATCTGTACAATTATTTGC | Antisense | 4616 |
| 1559584_a_at | 262 | 455 | 2434 | CCATCTGTACAATTATTTGCTTTAT | Antisense | 4617 |
| 1559584_a_at | 10 | 351 | 2465 | CTTTAAATTGGCTCATTATTCACTT | Antisense | 4618 |
| 1559584_a_at | 197 | 293 | 2470 | AATTGGCTCATTATTCACTTAATGA | Antisense | 4619 |
| 1559584_a_at | 289 | 597 | 2493 | GAAATTATTGCAACAGGAATCTTTT | Antisense | 4620 |
| 1559584_a_at | 590 | 543 | 2502 | GCAACAGGAATCTTTTGTATCACTT | Antisense | 4621 |
| 1559584_a_at | 1055 | 553 | 2509 | GAATCTTTTGTATCACTTCTGTAAA | Antisense | 4622 |
| 1559584_a_at | 1061 | 751 | 2544 | GTCTCATTTGCCATCAATAGAAGGT | Antisense | 4623 |
| 1561042_at | 939 | 203 | 444 | AAATGCAGATAAAGGCTACCTCTGA | Antisense | 4624 |
| 1561042_at | 950 | 1047 | 453 | TAAAGGCTACCTCTGAATTCTCAAT | Antisense | 4625 |
| 1561042_at | 156 | 207 | 454 | AAAGGCTACCTCTGAATTCTCAATA | Antisense | 4626 |
| 1561042_at | 287 | 75 | 456 | AGGCTACCTCTGAATTCTCAATAGA | Antisense | 4627 |
| 1561042_at | 640 | 549 | 467 | GAATTCTCAATAGATTCATCATGTT | Antisense | 4628 |
| 1561042_at | 390 | 285 | 475 | AATAGATTCATCATGTTTGCTCTTA | Antisense | 4629 |
| 1561042_at | 971 | 691 | 479 | GATTCATCATGTTTGCTCTTAAGTG | Antisense | 4630 |
| 1561042_at | 921 | 1015 | 482 | TCATCATGTTTGCTCTTAAGTGTAG | Antisense | 4631 |
| 1561042_at | 76 | 719 | 489 | GTTTGCTCTTAAGTGTAGCTGTCCA | Antisense | 4632 |
| 1561042_at | 390 | 963 | 492 | TGCTCTTAAGTGTAGCTGTCCACAC | Antisense | 4633 |
| 1561042_at | 902 | 379 | 494 | CTCTTAAGTGTAGCTGTCCACACTG | Antisense | 4634 |
| 1562031_at | 1147 | 61 | 1892 | ATGTTCACTGTATGTGCCAAGCCTA | Antisense | 4635 |
| 1562031_at | 289 | 165 | 1898 | ACTGTATGTGCCAAGCCTAATATGA | Antisense | 4636 |
| 1562031_at | 811 | 761 | 1905 | GTGCCAAGCCTAATATGAGAGCTAT | Antisense | 4637 |
| 1562031_at | 374 | 1103 | 1933 | TTATAGAGTTTATGCTACAGCCCTA | Antisense | 4638 |
| 1562031_at | 1143 | 113 | 1937 | AGAGTTTATGCTACAGCCCTACCTT | Antisense | 4639 |
| 1562031_at | 529 | 189 | 1949 | ACAGCCCTACCTTCAGGAAACTTAT | Antisense | 4640 |
| 1562031_at | 743 | 77 | 1963 | AGGAAACTTATCTACTGGACAAACA | Antisense | 4641 |
| 1562031_at | 377 | 179 | 2022 | ACATTGTAATTATCTAGCATAGGCA | Antisense | 4642 |
| 1562031_at | 519 | 519 | 2038 | GCATAGGCAAATATAGACAGTAACA | Antisense | 4643 |
| 1562031_at | 968 | 229 | 2059 | AACAGACAGGTTTACAATTATTAAG | Antisense | 4644 |
| 1562031_at | 442 | 293 | 2073 | CAATTATTAAGAAAGGGCAGCCAGG | Antisense | 4645 |
| 1563497_at | 251 | 1063 | 4804 | TACCATAGCAAGTTCTTATCCTTTG | Antisense | 4646 |
| 1563497_at | 173 | 157 | 4861 | ACCTGTCACAGTAATATGCCAATTT | Antisense | 4647 |
| 1563497_at | 943 | 467 | 4878 | GCCAATTTTTGGTGTCGCTTTAGTA | Antisense | 4648 |
| 1563497_at | 834 | 749 | 4965 | GTCTTTCCTCAGTTGTCTCCTAAAA | Antisense | 4649 |
| 1563497_at | 555 | 677 | 5022 | GATCGTCTTGTGCAGCCCTTTAAAA | Antisense | 4650 |
| 1563497_at | 941 | 53 | 5048 | ATGCGTTTTGCATTCATGTCTTTGC | Antisense | 4651 |
| 1563497_at | 920 | 365 | 5088 | CTTTCATTTTGGGAGTGACTGTCAT | Antisense | 4652 |
| 1563497_at | 1079 | 189 | 5141 | ACACCAGGGCCAGATTGCGTGGGTT | Antisense | 4653 |
| 1563497_at | 610 | 965 | 5156 | TGCGTGGGTTCTAGCTAGGGACCTA | Antisense | 4654 |
| 1563497_at | 1053 | 141 | 5182 | AGCTGGTTACTTGATTTCTCTCTGT | Antisense | 4655 |
| 1563497_at | 93 | 1137 | 5197 | TTCTCTCTGTTCCATTTACTATCTG | Antisense | 4656 |
| 200904_at | 733 | 919 | 1987 | TGTGCCTTCATTCATGGGTTAATGG | Antisense | 4657 |
| 200904_at | 842 | 267 | 2015 | AATGGGTTATCACAGGAATGGGACT | Antisense | 4658 |
| 200904_at | 754 | 115 | 2063 | AGAGAACTGAGCTAGCATGCCCAGC | Antisense | 4659 |
| 200904_at | 296 | 421 | 2087 | CCCACAGAGAGCCTCCACTAGAGTG | Antisense | 4660 |
| 200904_at | 877 | 625 | 2095 | GAGCCTCCACTAGAGTGATGCTAAG | Antisense | 4661 |
| 200904_at | 590 | 749 | 2168 | GTCTAGTGTCTAGTGGATCCAGGCC | Antisense | 4662 |
| 200904_at | 756 | 839 | 2182 | GGATCCAGGCCACAGGAGAGAGTGC | Antisense | 4663 |
| 200904_at | 1010 | 237 | 2253 | AACTGTGGAGTCAGTGGCAGCATGC | Antisense | 4664 |
| 200904_at | 421 | 211 | 2292 | AAAGCTTTAGGCACCAGCCTGCAAC | Antisense | 4665 |
| 200904_at | 729 | 415 | 2322 | CGAGCAGCCACGTAGGCTGCACCCA | Antisense | 4666 |
| 200904_at | 806 | 451 | 2506 | CCTTCCCAGGCTGATCTGAGGTAAA | Antisense | 4667 |
| 200905_x_at | 720 | 213 | 1095 | AAAGCCTGAGACAGCTGCCTTGTGT | Antisense | 4668 |
| 200905_x_at | 1116 | 415 | 1121 | CGACTGAGATGCACAGCTGCCTTGT | Antisense | 4669 |
| 200905_x_at | 1111 | 503 | 1136 | GCTGCCTTGTGTGCGACTGAGATGC | Antisense | 4670 |
| 200905_x_at | 757 | 941 | 1153 | TGAGATGCAGGATTTCCTCACGCCT | Antisense | 4671 |
| 200905_x_at | 919 | 65 | 1183 | ATGTGTCTTAGGGGACTCTGGCTTC | Antisense | 4672 |
| 200905_x_at | 504 | 879 | 1202 | GGCTTCTCTTTTTGCAAGGGCCTCT | Antisense | 4673 |
| 200905_x_at | 369 | 999 | 1230 | TCTGTCTGTGTCCCTGTTAGCACAA | Antisense | 4674 |
| 200905_x_at | 608 | 115 | 1266 | AGAGAAACAGTCCACCTCTGTGTCT | Antisense | 4675 |
| 200905_x_at | 1142 | 913 | 1360 | TGGGCAGAGTGCGGCAGCTCATGCC | Antisense | 4676 |
| 200905_x_at | 917 | 771 | 1587 | GTGAGCCAGGATTGTGCGACTGCAC | Antisense | 4677 |
| 200905_x_at | 728 | 809 | 1620 | GGGTGACAGGGTGAAACGCCATCTC | Antisense | 4678 |
| 201009_s_at | 311 | 31 | 1461 | ATACTGAGGTGGATCCCTGCATCCT | Antisense | 4679 |
| 201009_s_at | 1005 | 427 | 1475 | CCCTGCATCCTCAACAACAATGTGC | Antisense | 4680 |
| 201009_s_at | 153 | 571 | 1520 | GAAGCAGCTTTACCTACTTGTTTCT | Antisense | 4681 |
| 201009_s_at | 57 | 365 | 1615 | CTTAGCCTCTGACTTCCTAATGTAG | Antisense | 4682 |
| 201009_s_at | 954 | 843 | 1639 | GGAGGTGGTCAGCAGGCAATCTCCT | Antisense | 4683 |
| 201009_s_at | 280 | 869 | 1653 | GGCAATCTCCTGGGCCTTAAAGGAT | Antisense | 4684 |
| 201009_s_at | 57 | 207 | 1671 | AAAGGATGCGGACTCATCCTCAGCC | Antisense | 4685 |
| 201009_s_at | 352 | 461 | 1694 | CCAGCGCCCATGTTGTGATACAGGG | Antisense | 4686 |
| 201009_s_at | 988 | 585 | 1749 | GAAAAACTCAGGCCCATCCATTTTC | Antisense | 4687 |
| 201009_s_at | 497 | 289 | 1789 | AATTGAGGCCTTTTCGATAGTTTCG | Antisense | 4688 |
| 201009_s_at | 245 | 205 | 1824 | AAATGGCCTCCTGGCGTAAGCTTTT | Antisense | 4689 |
| 201010_s_at | 1118 | 775 | 2116 | GTGTTCTCCTACTGCAAATATTTTC | Antisense | 4690 |
| 201010_s_at | 612 | 829 | 2153 | GGTTTTCTCTTCATGTAAGTCCTTG | Antisense | 4691 |
| 201010_s_at | 776 | 931 | 2196 | TGTTCTTAGCACTTTAATTCCTGTC | Antisense | 4692 |
| 201010_s_at | 968 | 499 | 2259 | GCTGAAACTGGTCTACTGTGTCTCT | Antisense | 4693 |
| 201010_s_at | 909 | 593 | 2373 | GAAAGGGTTGCTGCTGTCAGCCTTG | Antisense | 4694 |
| 201010_s_at | 538 | 301 | 2444 | CAACCCTGTGATCAGAACCTCCAAA | Antisense | 4695 |
| 201010_s_at | 777 | 107 | 2540 | AGATAGGGATATTGGCCCCTCACTG | Antisense | 4696 |
| 201010_s_at | 1097 | 313 | 2587 | CACTCTCAGCCATAGCACTTTGTTC | Antisense | 4697 |
| 201010_s_at | 814 | 175 | 2603 | ACTTTGTTCACTGTCCTGTGTCAGA | Antisense | 4698 |
| 201010_s_at | 668 | 917 | 2619 | TGTGTCAGAGCACTGAGCTCCACCC | Antisense | 4699 |
| 201010_s_at | 799 | 139 | 2634 | AGCTCCACCCTTTTCTGAGAGTTAT | Antisense | 4700 |
| 201891_s_at | 282 | 1105 | 535 | TTTATAATTCTACTTTGAGTGCTGT | Antisense | 4701 |
| 201891_s_at | 394 | 499 | 555 | GCTGTCTCCATGTTTGATGTATCTG | Antisense | 4702 |
| 201891_s_at | 1073 | 723 | 573 | GTATCTGAGCAGGTTGCTCCACAGG | Antisense | 4703 |
| 201891_s_at | 954 | 633 | 636 | GAGAATTCTCTTATCCAACATCAAC | Antisense | 4704 |
| 201891_s_at | 927 | 1135 | 641 | TTCTCTTATCCAACATCAACATCTT | Antisense | 4705 |
| 201891_s_at | 1077 | 347 | 660 | CATCTTGGTCAGATTTGAACTCTTC | Antisense | 4706 |
| 201891_s_at | 833 | 171 | 678 | ACTCTTCAATCTCTTGCACTCAAAG | Antisense | 4707 |
| 201891_s_at | 626 | 279 | 685 | AATCTCTTGCACTCAAAGCTTGTTA | Antisense | 4708 |
| 201891_s_at | 543 | 233 | 733 | AACTTCCAATTTACATACTCTGCTT | Antisense | 4709 |
| 201891_s_at | 868 | 691 | 840 | GATTCATATTTACTTCTTATACATT | Antisense | 4710 |
| 201891_s_at | 84 | 877 | 876 | GGCATGGTTGTGGTTAATCTGGTTT | Antisense | 4711 |
| 202546_at | 849 | 675 | 67 | GATCTGGTGCGGAACCTGCAAAGTG | Antisense | 4712 |
| 202546_at | 1110 | 421 | 119 | CCCAGAATGTGGAGCGGATCCTGGC | Antisense | 4713 |
| 202546_at | 90 | 585 | 151 | GAAAACTTGGAACATCTCCGCAACA | Antisense | 4714 |
| 202546_at | 1046 | 579 | 160 | GAACATCTCCGCAACAAGACAGAGG | Antisense | 4715 |
| 202546_at | 503 | 659 | 181 | GAGGATCTGGAAGCCACATCTGAGC | Antisense | 4716 |
| 202546_at | 497 | 245 | 191 | AAGCCACATCTGAGCACTTCAAGAC | Antisense | 4717 |
| 202546_at | 274 | 631 | 202 | GAGCACTTCAAGACGACATCGCAGA | Antisense | 4718 |
| 202546_at | 1001 | 617 | 213 | GACGACATCGCAGAAGGTGGCTCGA | Antisense | 4719 |
| 202546_at | 549 | 265 | 226 | AAGGTGGCTCGAAAATTCTGGTGGA | Antisense | 4720 |
| 202546_at | 152 | 671 | 261 | GATGATTGTCCTTATCTGCGTGATT | Antisense | 4721 |
| 202546_at | 672 | 463 | 320 | CCACTGGTGCCTTCTCTTAAAGTAA | Antisense | 4722 |
| 202688_at | 760 | 381 | 1181 | CTCTACCTCATATCAGTTTGCTAGC | Antisense | 4723 |
| 202688_at | 894 | 253 | 1216 | AAGACTGTCAGCTTCCAAACATTAA | Antisense | 4724 |
| 202688_at | 78 | 57 | 1240 | ATGCAATGGTTAACATCTTCTGTCT | Antisense | 4725 |
| 202688_at | 505 | 999 | 1258 | TCTGTCTTTATAATCTACTCCTTGT | Antisense | 4726 |
| 202688_at | 933 | 1035 | 1268 | TAATCTACTCCTTGTAAAGACTGTA | Antisense | 4727 |
| 202688_at | 971 | 123 | 1295 | AGAAAGCGCAACAATCCATCTCTCA | Antisense | 4728 |
| 202688_at | 450 | 51 | 1308 | ATCCATCTCTCAAGTAGTGTATCAC | Antisense | 4729 |
| 202688_at | 614 | 93 | 1323 | AGTGTATCACAGTAGTAGCCTCCAG | Antisense | 4730 |
| 202688_at | 623 | 1023 | 1329 | TCACAGTAGTAGCCTCCAGGTTTCC | Antisense | 4731 |
| 202688_at | 79 | 663 | 1388 | GAGGCACCACTAAAAGATCGCAGTT | Antisense | 4732 |
| 202688_at | 829 | 47 | 1404 | ATCGCAGTTTGCCTGGTGCAGTGGC | Antisense | 4733 |
| 203915_at | 1064 | 689 | 1973 | GATTATCAATTACCACACCATCTCC | Antisense | 4734 |
| 203915_at | 1124 | 569 | 2058 | GAAGCATGATTGGTGCCCAGTTAGC | Antisense | 4735 |
| 203915_at | 634 | 423 | 2073 | CCCAGTTAGCCTCTGCAGGATGTGG | Antisense | 4736 |
| 203915_at | 836 | 725 | 2131 | GTAGGAGAGGTTGTCTGTGGCCAGA | Antisense | 4737 |
| 203915_at | 555 | 153 | 2162 | ACCTATACTCACTTTCCCAAATTGA | Antisense | 4738 |
| 203915_at | 672 | 1151 | 2183 | TTGAATCACTGCTCACACTGCTGAT | Antisense | 4739 |
| 203915_at | 1055 | 1067 | 2212 | TAGAGTGCTGTCCGGTGGAGATCCC | Antisense | 4740 |
| 203915_at | 116 | 433 | 2235 | CCACCCGAACGTCTTATCTAATCAT | Antisense | 4741 |
| 203915_at | 256 | 41 | 2255 | ATCATGAAACTCCCTAGTTCCTTCA | Antisense | 4742 |
| 203915_at | 1156 | 701 | 2271 | GTTCCTTCATGTAACTTCCCTGAAA | Antisense | 4743 |
| 203915_at | 954 | 1093 | 2315 | TTTGAGAGTCTGTGACCCACTTACC | Antisense | 4744 |
| 204057_at | 184 | 293 | 2371 | AATTGTCGGATTTTCCATGTCCTCC | Antisense | 4745 |
| 204057_at | 401 | 243 | 2441 | AACCTCCCAGTGAAAGGGCAGCCTT | Antisense | 4746 |
| 204057_at | 679 | 593 | 2452 | GAAAGGGCAGCCTTCATTTTGAGAA | Antisense | 4747 |
| 204057_at | 934 | 801 | 2497 | GGGAGACAGCTCATCCAATCTCCCA | Antisense | 4748 |
| 204057_at | 1128 | 293 | 2512 | CAATCTCCCAAGTCTCATGGTGGAT | Antisense | 4749 |
| 204057_at | 440 | 771 | 2539 | GTGACTGTGAGAGTTTCCGGTTTAA | Antisense | 4750 |
| 204057_at | 600 | 245 | 2572 | AAGCCAGATATGCCTGTTTCCTTTT | Antisense | 4751 |
| 204057_at | 32 | 787 | 2612 | GTGGAGGGGACAGTCAGACCCAGAG | Antisense | 4752 |
| 204057_at | 554 | 619 | 2628 | GACCCAGAGGTCCTTTACGTGTGGA | Antisense | 4753 |
| 204057_at | 1009 | 79 | 2673 | AGGAGAGGACCAGGGGACGTGGCTT | Antisense | 4754 |
| 204057_at | 840 | 223 | 2768 | AACAATAGGCTTGAATCTCCAATTC | Antisense | 4755 |
| 204078_at | 1122 | 233 | 2016 | AACTTAAGATGGACACAGCTGACTG | Antisense | 4756 |
| 204078_at | 339 | 111 | 2022 | AGATGGACACAGCTGACTGGACCCC | Antisense | 4757 |
| 204078_at | 40 | 313 | 2091 | CACTTCTATGTCTCTGGACCACAGG | Antisense | 4758 |
| 204078_at | 125 | 871 | 2137 | GGCAAGTGGGCTGATGGGGTCCGCC | Antisense | 4759 |
| 204078_at | 895 | 751 | 2192 | GTCTCCTGGACAAGGAGTTTCCAGC | Antisense | 4760 |
| 204078_at | 470 | 439 | 2196 | CCTGGACAAGGAGTTTCCAGCTGCT | Antisense | 4761 |
| 204078_at | 460 | 885 | 2221 | GGCTGGAGTCTCAGGCCAAATTGCA | Antisense | 4762 |
| 204078_at | 55 | 73 | 2233 | AGGCCAAATTGCAGAGGGTCCTCCA | Antisense | 4763 |
| 204078_at | 1110 | 337 | 2256 | CAGGGTCCTGAAGAGCACTGGACTA | Antisense | 4764 |
| 204078_at | 1062 | 441 | 2262 | CCTGAAGAGCACTGGACTAAGAGTC | Antisense | 4765 |
| 204078_at | 250 | 173 | 2277 | ACTAAGAGTCTAGTGGTTCCAGGGC | Antisense | 4766 |
| 204116_at | 475 | 1137 | 867 | TTCTGGCTGGAACGGACGATGCCCC | Antisense | 4767 |
| 204116_at | 606 | 821 | 917 | GGATCTTGTTACTGAATACCACGGG | Antisense | 4768 |
| 204116_at | 110 | 817 | 960 | GGTGTGTCTAAGGGACTGGCTGAGA | Antisense | 4769 |
| 204116_at | 902 | 173 | 997 | ACTACAGTGAACGACTCTGCCTCGT | Antisense | 4770 |
| 204116_at | 121 | 613 | 1009 | GACTCTGCCTCGTCAGTGAGATTCC | Antisense | 4771 |
| 204116_at | 998 | 707 | 1111 | GTTACACCCTAAAGCCTGAAACCTG | Antisense | 4772 |
| 204116_at | 845 | 241 | 1136 | AACCCCAATCCTCTGACAGAAGAAC | Antisense | 4773 |
| 204116_at | 309 | 819 | 1166 | GGTCCTGTAGCCCTAAGTGGTACTA | Antisense | 4774 |
| 204116_at | 1123 | 781 | 1182 | GTGGTACTAACTTTCCTTCATTCAA | Antisense | 4775 |
| 204116_at | 877 | 883 | 1242 | GGCTGATTTGGAATTTTGTGCCCCC | Antisense | 4776 |
| 204116_at | 453 | 285 | 1253 | AATTTTGTGCCCCCATGTAAGCACC | Antisense | 4777 |
| 204233_s_at | 172 | 543 | 1157 | GCAAACATCCGGAAGTATCCCACCA | Antisense | 4778 |
| 204233_s_at | 743 | 1079 | 1172 | TATCCCACCAAGAAACAACAGCTCC | Antisense | 4779 |
| 204233_s_at | 950 | 1085 | 1201 | TATTTCCAGTTACTTGCCTGCATTC | Antisense | 4780 |
| 204233_s_at | 431 | 1035 | 1294 | TAATAGGTTTGCCCTTGCATCTCAT | Antisense | 4781 |
| 204233_s_at | 378 | 801 | 1327 | GGGACTGTGGTCCATTGTACAAGCC | Antisense | 4782 |
| 204233_s_at | 60 | 549 | 1367 | GAATTTGGGTACATGGACTACGCCC | Antisense | 4783 |
| 204233_s_at | 307 | 857 | 1381 | GGACTACGCCCAAGCAAGGTTTGAT | Antisense | 4784 |
| 204233_s_at | 803 | 565 | 1426 | GAAGCTTGGGGTGTGACTGTGGGGA | Antisense | 4785 |
| 204233_s_at | 152 | 155 | 1462 | ACCTCATCACTGGACTGCATGGGGA | Antisense | 4786 |
| 204233_s_at | 742 | 789 | 1530 | GTGGCAGGAGGCTTTGGGTGGCTCA | Antisense | 4787 |
| 204233_s_at | 936 | 1091 | 1542 | TTTGGGTGGCTCACTACTGAACACA | Antisense | 4788 |
| 204661_at | 99 | 189 | 14 | ACAGCCACGAAGATCCTACCAAAAT | Antisense | 4789 |
| 204661_at | 730 | 465 | 32 | CCAAAATGAAGCGCTTCCTCTTCCT | Antisense | 4790 |
| 204661_at | 1029 | 347 | 66 | CATCAGCCTCCTGGTTATGGTACAG | Antisense | 4791 |
| 204661_at | 518 | 827 | 84 | GGTACAGATACAAACTGGACTCTCA | Antisense | 4792 |
| 204661_at | 966 | 611 | 101 | GACTCTCAGGACAAAACGACACCAG | Antisense | 4793 |
| 204661_at | 445 | 523 | 145 | GCATCCAGCAGCATGAGCGGAGGCA | Antisense | 4794 |
| 204661_at | 692 | 791 | 184 | GTGGCCAATGCCATAATCCACCTCT | Antisense | 4795 |
| 204661_at | 635 | 105 | 217 | AGTTGAGGTGACACGTCTCAGCCTT | Antisense | 4796 |
| 204661_at | 553 | 471 | 266 | GCCACCATCACTCGCAAGAGAATCC | Antisense | 4797 |
| 204661_at | 162 | 1161 | 300 | TTGGGAGGGGTTGATGCCAGACATC | Antisense | 4798 |
| 204661_at | 357 | 811 | 377 | GGGGGTAATGATGTAGGGGCCAAGC | Antisense | 4799 |
| 204724_s_at | 432 | 321 | 1896 | CACCAGCAAGGACGGCCAGGACGGT | Antisense | 4800 |
| 204724_s_at | 538 | 145 | 2007 | AGCCTGCCAAGGAGCCGTGTTAGGA | Antisense | 4801 |
| 204724_s_at | 1011 | 595 | 2043 | GAAATCAGGCTCTCGAAGCTCATAA | Antisense | 4802 |
| 204724_s_at | 984 | 569 | 2081 | GAAGCAAGTGACAAGGACGCCCGAA | Antisense | 4803 |
| 204724_s_at | 4 | 619 | 2096 | GACGCCCGAAGCACAGTGGACGGTC | Antisense | 4804 |
| 204724_s_at | 198 | 855 | 2113 | GGACGGTCATGAAGGAGCGGGGGTG | Antisense | 4805 |
| 204724_s_at | 188 | 761 | 2153 | GTCCAGGAGAGGGAGCGCCCCTGGC | Antisense | 4806 |
| 204724_s_at | 537 | 883 | 2232 | GGCTGTCGCCTGACAGCATACCTCA | Antisense | 4807 |
| 204724_s_at | 1032 | 519 | 2247 | GCATACCTCAAAAGGCCCTAGCTAA | Antisense | 4808 |
| 204724_s_at | 790 | 833 | 2323 | GGTTGTGTACAACTCCACGAGGTGA | Antisense | 4809 |
| 204724_s_at | 617 | 1045 | 2383 | TAAAGACTATGATCTCATCCCAATA | Antisense | 4810 |
| 205159_at | 313 | 689 | 4290 | GATTTACAAAGGTCCTCCCATTGCA | Antisense | 4811 |
| 205159_at | 399 | 1099 | 4346 | TTTCTAGTTCATTTTGTGTTTCCAA | Antisense | 4812 |
| 205159_at | 861 | 841 | 4407 | GGATGTGAGACTGAGGTGCCTTTTG | Antisense | 4813 |
| 205159_at | 984 | 821 | 4421 | GGTGCCTTTTGGTACTGAAATTCTT | Antisense | 4814 |
| 205159_at | 1153 | 595 | 4437 | GAAATTCTTTTTCCATGTACCTGAA | Antisense | 4815 |
| 205159_at | 486 | 1083 | 4496 | TATACTTTATTGGTCCCTAGGCTTC | Antisense | 4816 |
| 205159_at | 840 | 75 | 4514 | AGGCTTCCTATTTTGTTACCTTGCT | Antisense | 4817 |
| 205159_at | 225 | 1121 | 4529 | TTACCTTGCTTTCTCTATGGCATCC | Antisense | 4818 |
| 205159_at | 495 | 897 | 4546 | TGGCATCCACCATTTTGATTGTTCT | Antisense | 4819 |
| 205159_at | 64 | 721 | 4606 | GTATTCTCGTTACTTTTGCTCTTAA | Antisense | 4820 |
| 205159_at | 1047 | 729 | 4733 | GTAGAATCCTCTGTTCATAATGAAC | Antisense | 4821 |
| 205204_at | 363 | 109 | 167 | AGATCCGAGTGCACTCGCGAGGCAA | Antisense | 4822 |
| 205204_at | 229 | 463 | 200 | CCACCGGTCACTTCATGGGCAAGAA | Antisense | 4823 |
| 205204_at | 297 | 801 | 281 | GGGACCAGCGACTGCAGCTGAGTCA | Antisense | 4824 |
| 205204_at | 580 | 649 | 300 | GAGTCATGATCTGCTCGGAATCCTC | Antisense | 4825 |
| 205204_at | 324 | 963 | 311 | TGCTCGGAATCCTCCTGCTAAAGAA | Antisense | 4826 |
| 205204_at | 608 | 535 | 364 | GCACCCCAAATCCAGTACAGGAGGC | Antisense | 4827 |
| 205204_at | 882 | 1073 | 424 | TAGGGGCAGACACAACAGCGTGGCT | Antisense | 4828 |
| 205204_at | 829 | 141 | 440 | AGCGTGGCTTAGATTGTGCCCACCC | Antisense | 4829 |
| 205204_at | 311 | 763 | 455 | GTGCCCACCCAGGGAAGGTGCTGAA | Antisense | 4830 |
| 205204_at | 1159 | 951 | 476 | TGAATGGGACCCTGTTGATGGCCCC | Antisense | 4831 |
| 205204_at | 541 | 279 | 525 | AATCTCTGTTACTCCATTACTGTGA | Antisense | 4832 |
| 205419_at | 665 | 323 | 1055 | CAGCCCCTGAAGAAAATTCACGTGA | Antisense | 4833 |
| 205419_at | 139 | 671 | 1095 | GATGATGATACATTCCAAGTCTTCA | Antisense | 4834 |
| 205419_at | 477 | 599 | 1171 | GACAAACTTTGCAGGACTTCCCTTA | Antisense | 4835 |
| 205419_at | 288 | 525 | 1181 | GCAGGACTTCCCTTATAAAGCAAAA | Antisense | 4836 |
| 205419_at | 1029 | 705 | 1211 | GTTCAGCTTCCAATTAGTATTCTTT | Antisense | 4837 |
| 205419_at | 465 | 1085 | 1236 | TATATTTCTTTCATTGGGCGCTTTC | Antisense | 4838 |
| 205419_at | 228 | 365 | 1256 | CTTTCCCATCTCCAACTCGGAAGTA | Antisense | 4839 |
| 205419_at | 104 | 565 | 1275 | GAAGTAAGCCCAAGAGAACAACATA | Antisense | 4840 |
| 205419_at | 952 | 551 | 1361 | GAATACACCAAAAGGAGGCGCTCTT | Antisense | 4841 |
| 205419_at | 451 | 1 | 1526 | AAATCCAAATTTCTCTCAATGTTAG | Antisense | 4842 |
| 205419_at | 469 | 649 | 1550 | GATTTAATTCCCTCAATAACACCAA | Antisense | 4843 |
| 205668_at | 791 | 863 | 6476 | GGAACTCTAAACCTTGTGATGACTA | Antisense | 4844 |
| 205668_at | 475 | 37 | 6550 | ATCACTTTAAGTTTTGACACCTAGA | Antisense | 4845 |
| 205668_at | 859 | 749 | 6580 | GTCTTAGTAATAGCATCCACTGGAA | Antisense | 4846 |
| 205668_at | 914 | 1021 | 6623 | TCAGCATTTAACTTACATTTGTACT | Antisense | 4847 |
| 205668_at | 496 | 1105 | 6739 | TTTATATAGTCTACAGTTGTCCTGA | Antisense | 4848 |
| 205668_at | 868 | 105 | 6753 | AGTTGTCCTGATTTCTTATTGAATT | Antisense | 4849 |
| 205668_at | 328 | 551 | 6773 | GAATTTGTTAGACTAGTTCTCTTGT | Antisense | 4850 |
| 205668_at | 85 | 705 | 6788 | GTTCTCTTGTCTTGTGATCTGTGTA | Antisense | 4851 |
| 205668_at | 695 | 1103 | 6817 | TTTAGTCACTAAGACTTTCCTCCAA | Antisense | 4852 |
| 205668_at | 422 | 1097 | 6832 | TTTCCTCCAAGAACTAAGCCAACTT | Antisense | 4853 |
| 205668_at | 261 | 165 | 6869 | ACGGCTGTATATAATGGTGATGTCA | Antisense | 4854 |
| 205696_s_at | 858 | 1143 | 2023 | TTCCTGTTCTCTTGTATAGCTGAAA | Antisense | 4855 |
| 205696_s_at | 927 | 703 | 2028 | GTTCTCTTGTATAGCTGAAATTCCA | Antisense | 4856 |
| 205696_s_at | 669 | 597 | 2044 | GAAATTCCAGTTTAGGAGCTCAGTT | Antisense | 4857 |
| 205696_s_at | 1014 | 635 | 2069 | GAGAAACAGTTCCATTCAACTGGAA | Antisense | 4858 |
| 205696_s_at | 17 | 951 | 2146 | TGAAAAACCTGATGCAGTGCTCCAT | Antisense | 4859 |
| 205696_s_at | 491 | 799 | 2209 | GGGACAGTTTGTAACTTGGGCTGTA | Antisense | 4860 |
| 205696_s_at | 666 | 1041 | 2344 | TAACTCCCATATCTCCTTTAATGAC | Antisense | 4861 |
| 205696_s_at | 299 | 425 | 2349 | CCCATATCTCCTTTAATGACATTGA | Antisense | 4862 |
| 205696_s_at | 247 | 5 | 2401 | ATTGATGCCAAGCTTTTTTGCCACA | Antisense | 4863 |
| 205696_s_at | 68 | 937 | 2403 | TGATGCCAAGCTTTTTTGCCACAAA | Antisense | 4864 |
| 205696_s_at | 1048 | 793 | 2447 | GGGCTTTGTGGAAACAGCTGGTACT | Antisense | 4865 |
| 205758_at | 463 | 323 | 1584 | CAGCCCTTGCATTGCAGAGGGGCCC | Antisense | 4866 |
| 205758_at | 1044 | 947 | 1610 | TGAAAGAGGACAGGCTACCCCTTTA | Antisense | 4867 |
| 205758_at | 210 | 217 | 1663 | AAACTAAGGCCCTCTTGAATCTCTG | Antisense | 4868 |
| 205758_at | 1134 | 681 | 1695 | GATACAAACATGTTCCTGGGATCAC | Antisense | 4869 |
| 205758_at | 390 | 123 | 1743 | AGACAATTGTTGGAGAGCCCCTCAC | Antisense | 4870 |
| 205758_at | 338 | 59 | 1804 | ATGAGGCAGACCTGACTCTCTTAAG | Antisense | 4871 |
| 205758_at | 858 | 237 | 1844 | AACTGCTGTCCCAAACATGCACTTC | Antisense | 4872 |
| 205758_at | 774 | 217 | 1856 | AAACATGCACTTCCTTGCTTAAGGT | Antisense | 4873 |
| 205758_at | 546 | 69 | 1881 | ATGGTACAAGCAATGCCTGCCCATT | Antisense | 4874 |
| 205758_at | 190 | 1077 | 1982 | TATGGTGTACATTCTTCCTGATTAT | Antisense | 4875 |
| 205758_at | 1084 | 359 | 1995 | CTTCCTGATTATTTTCTACACATAC | Antisense | 4876 |
| 205890_s_at | 632 | 625 | 195 | GATCTTAAAGCCACGGAGAAGCCTC | Antisense | 4877 |
| 205890_s_at | 247 | 969 | 293 | TGCCCTTGTTTCTTGTGGAGTCAGG | Antisense | 4878 |
| 205890_s_at | 584 | 59 | 320 | ATGAGGCAAAGAGGCACCTCCTCCA | Antisense | 4879 |
| 205890_s_at | 578 | 561 | 350 | GAAGGTCCAGCTCAGTGGCACAAGT | Antisense | 4880 |
| 205890_s_at | 767 | 615 | 396 | GACGGGTATAATCCCTGAGACCCAG | Antisense | 4881 |
| 205890_s_at | 615 | 619 | 414 | GACCCAGATTGTGACTTGCAATGGA | Antisense | 4882 |
| 205890_s_at | 783 | 113 | 481 | AGAAAGGGCAACTTACTCTTCCTGG | Antisense | 4883 |
| 205890_s_at | 67 | 173 | 495 | ACTCTTCCTGGCATCTTATTGTATT | Antisense | 4884 |
| 205890_s_at | 814 | 279 | 578 | AATCTCTTACTCAACGAACACATCT | Antisense | 4885 |
| 205890_s_at | 573 | 349 | 598 | CATCTTCTGATGATTTCCCAAAATT | Antisense | 4886 |
| 205890_s_at | 415 | 7 | 678 | ATTGCCCAACTCTATGTTTCTTTGA | Antisense | 4887 |
| 206082_at | 159 | 953 | 2011 | TGAAGGATGGTGACTGCGCCATGGC | Antisense | 4888 |
| 206082_at | 303 | 981 | 2053 | TCCTTTCCTGTGGAGGCTCCACTCA | Antisense | 4889 |
| 206082_at | 752 | 981 | 2087 | TCCTCCTATGTCACCTAGAGTGTGG | Antisense | 4890 |
| 206082_at | 638 | 235 | 2150 | AACTCAAACAGGCTCACCAGGCAGT | Antisense | 4891 |
| 206082_at | 233 | 673 | 2202 | GATGCAACAGTTTGTCTTCACATTG | Antisense | 4892 |
| 206082_at | 127 | 1127 | 2218 | TTCACATTGGAAGGACACCCCTGGA | Antisense | 4893 |
| 206082_at | 890 | 173 | 2254 | ACTAGACCTGTAAAACTTCACTGCA | Antisense | 4894 |
| 206082_at | 286 | 469 | 2282 | GCCACTTCTGAATCTCTGTAAGGTT | Antisense | 4895 |
| 206082_at | 952 | 1119 | 2340 | TTACCAAAGCCTCTAGTGTACCGTC | Antisense | 4896 |
| 206082_at | 861 | 977 | 2438 | TCCAGGTTCTCCAGATCTCTTAAGA | Antisense | 4897 |
| 206082_at | 811 | 249 | 2459 | AAGACTGTACTATAGAGGCCTGGGG | Antisense | 4898 |
| 206134_at | 437 | 367 | 1600 | CTTTCTATATTGTTATCAGTCCAGG | Antisense | 4899 |
| 206134_at | 424 | 607 | 1650 | GACATTGGCTCTTTGTTTAGGCCTA | Antisense | 4900 |
| 206134_at | 26 | 551 | 1725 | GAATTTGTGACTTAGTTCTGCCCTT | Antisense | 4901 |
| 206134_at | 512 | 591 | 1762 | GAAAGCAGTCTTCCATCAAATCACC | Antisense | 4902 |
| 206134_at | 398 | 275 | 1791 | AATGCACGGCTAAACTATTCAGAGT | Antisense | 4903 |
| 206134_at | 1079 | 259 | 1841 | AAGTACTATGCTTTAATGCTTCTTT | Antisense | 4904 |
| 206134_at | 443 | 517 | 1858 | GCTTCTTTCATCTTACTAGTATGGC | Antisense | 4905 |
| 206134_at | 791 | 1077 | 1953 | TATGTTATTCCTCTGTGTTCACTTC | Antisense | 4906 |
| 206134_at | 539 | 177 | 1973 | ACTTCGCCTTGCTCTTGAAAGTGCA | Antisense | 4907 |
| 206134_at | 1134 | 721 | 2055 | GTATATCCTATACACACATCTCCTT | Antisense | 4908 |
| 206134_at | 103 | 943 | 2104 | TGAGAAGTCTACATTGCTTACATTT | Antisense | 4909 |
| 206540_at | 951 | 837 | 1035 | GGATCAATGGGTTTAACTTGGGCCG | Antisense | 4910 |
| 206540_at | 542 | 175 | 1050 | ACTTGGGCCGGTACTGGACAAAGCA | Antisense | 4911 |
| 206540_at | 1042 | 599 | 1066 | GACAAAGCAGGGGCCACAACAGACC | Antisense | 4912 |
| 206540_at | 602 | 467 | 1100 | CCAAGATTCCTGCTGTTTCCTAGGG | Antisense | 4913 |
| 206540_at | 228 | 813 | 1122 | GGGGAGCCCTCAACAAAATTACATT | Antisense | 4914 |
| 206540_at | 450 | 235 | 1152 | AACTAGAAGATGTACCTCTCCAGCC | Antisense | 4915 |
| 206540_at | 479 | 975 | 1170 | TCCAGCCCCAAGTCCAATTTTTGGA | Antisense | 4916 |
| 206540_at | 663 | 477 | 1198 | GCCTATCCTCAATAGCACTAGTACT | Antisense | 4917 |
| 206540_at | 528 | 313 | 1213 | CACTAGTACTTTGCACAGGACACAT | Antisense | 4918 |
| 206540_at | 343 | 193 | 1232 | ACACATATCAATTCCCTTTCAGCTG | Antisense | 4919 |
| 206540_at | 626 | 933 | 1255 | TGATACACTGAGTGCCTCTGAACCA | Antisense | 4920 |
| 206574_s_at | 471 | 561 | 426 | GAAGGATGGCATCACCGTTGTGGAC | Antisense | 4921 |
| 206574_s_at | 361 | 897 | 432 | TGGCATCACCGTTGTGGACTGGCCG | Antisense | 4922 |
| 206574_s_at | 1111 | 615 | 448 | GACTGGCCGTTTGACGATGGGGCGC | Antisense | 4923 |
| 206574_s_at | 1124 | 827 | 486 | GGTAGTGGAAGACTGGCTGAGCCTG | Antisense | 4924 |
| 206574_s_at | 887 | 349 | 669 | CATCAACAGCAAGCAGCTCACCTAC | Antisense | 4925 |
| 206574_s_at | 830 | 1023 | 686 | TCACCTACCTGGAGAAATACCGGCC | Antisense | 4926 |
| 206574_s_at | 596 | 331 | 715 | CAGAGGCTGCGGTTCAAAGACCCAC | Antisense | 4927 |
| 206574_s_at | 384 | 541 | 744 | GCACAAGACCCGGTGCTGCGTTATG | Antisense | 4928 |
| 206574_s_at | 249 | 493 | 761 | GCGTTATGTAGCTCAGGACCTTGGC | Antisense | 4929 |
| 206574_s_at | 117 | 793 | 787 | GGGCCTGGTCGTCATGTAGGTCAGG | Antisense | 4930 |
| 206574_s_at | 1126 | 443 | 910 | CCTCCGTGCACTTGTGTCCGAGGAG | Antisense | 4931 |
| 206666_at | 531 | 211 | 471 | AAACCTCTCTTAGATCTGGAACCAA | Antisense | 4932 |
| 206666_at | 1105 | 147 | 517 | AGCCACCGATCCAGATTCATTAAGA | Antisense | 4933 |
| 206666_at | 321 | 1131 | 532 | TTCATTAAGACCTTCTGACACCCTG | Antisense | 4934 |
| 206666_at | 404 | 191 | 549 | ACACCCTGCGAGAAGTCACTGTTAC | Antisense | 4935 |
| 206666_at | 594 | 813 | 696 | GGGGCCCCTTGATCTGTAAAGGTGT | Antisense | 4936 |
| 206666_at | 586 | 207 | 713 | AAAGGTGTCTTCCACGCTATAGTCT | Antisense | 4937 |
| 206666_at | 673 | 785 | 753 | GTGGTGTTGCCACAAAGCCTGGAAT | Antisense | 4938 |
| 206666_at | 972 | 867 | 773 | GGAATCTACACCCTGTTAACCAAGA | Antisense | 4939 |
| 206666_at | 335 | 905 | 809 | TGGATCAAAAGCAACCTTGTCCCGC | Antisense | 4940 |
| 206666_at | 590 | 757 | 827 | GTCCCGCCTCATACAAATTAAGTTA | Antisense | 4941 |
| 206666_at | 448 | 1075 | 935 | TATGGGGTCCATTTTTGCACTTGTA | Antisense | 4942 |
| 207175_at | 334 | 199 | 3936 | AAATAACATACGCACTCAACTTCCT | Antisense | 4943 |
| 207175_at | 707 | 355 | 4062 | CTTGACAGACTCTCGTTCTGTGGCC | Antisense | 4944 |
| 207175_at | 793 | 169 | 4119 | ACTGCTACCTCTACCATGAGCAATT | Antisense | 4945 |
| 207175_at | 446 | 155 | 4125 | ACCTCTACCATGAGCAATTCTCCTG | Antisense | 4946 |
| 207175_at | 845 | 1025 | 4232 | TCACCACATTCGTCAGGTTGGTTTC | Antisense | 4947 |
| 207175_at | 703 | 349 | 4321 | CATCACACCTGGTCAACTTTCTTTT | Antisense | 4948 |
| 207175_at | 126 | 25 | 4364 | ATATCTTTTTCCATCATGTTACTTT | Antisense | 4949 |
| 207175_at | 123 | 273 | 4415 | AATGTGTTTCTTACAGACTGCATGT | Antisense | 4950 |
| 207175_at | 860 | 187 | 4427 | ACAGACTGCATGTAGTTGGGTATAA | Antisense | 4951 |
| 207175_at | 1154 | 695 | 4441 | GTTGGGTATAATTTTTATCCAGTCT | Antisense | 4952 |
| 207175_at | 1147 | 285 | 4469 | AATATCTGTCTTTTAATTGGTGTTT | Antisense | 4953 |
| 207651_at | 757 | 1147 | 828 | TTGCCTTGTAATTCGACAGCTCTAC | Antisense | 4954 |
| 207651_at | 1133 | 175 | 906 | ACTTTTAGTGACCACGGGCTACATC | Antisense | 4955 |
| 207651_at | 103 | 795 | 921 | GGGCTACATCATATGCTTTGTTCCT | Antisense | 4956 |
| 207651_at | 23 | 31 | 968 | ATACCCTCAGCCAGACAGAAGTCAT | Antisense | 4957 |
| 207651_at | 997 | 563 | 985 | GAAGTCATAACTGATTGCTCAACCA | Antisense | 4958 |
| 207651_at | 1084 | 961 | 1000 | TGCTCAACCAGGATTTCACTCTTCA | Antisense | 4959 |
| 207651_at | 572 | 245 | 1025 | AAGCCAAAGAGGCTACACTGCTCCT | Antisense | 4960 |
| 207651_at | 1026 | 961 | 1066 | TGCTTTGATCCTATCCTGTACTATC | Antisense | 4961 |
| 207651_at | 257 | 211 | 1099 | AAAGCATTCCGCTCAAAGGTCACTG | Antisense | 4962 |
| 207651_at | 1005 | 1027 | 1118 | TCACTGAGACTTTTGCCTCACCTAA | Antisense | 4963 |
| 207651_at | 800 | 959 | 1208 | TGCTACCAATTCTGGCCTTACTGGA | Antisense | 4964 |
| 208296_x_at | 1080 | 1151 | 1417 | TTGAGTTCTCCTTTTAAGTACCAAT | Antisense | 4965 |
| 208296_x_at | 428 | 811 | 1469 | GGTGTGTCATTGCCTTGAAATGCTT | Antisense | 4966 |
| 208296_x_at | 537 | 595 | 1485 | GAAATGCTTGCTTAGGGCTTCTTTT | Antisense | 4967 |
| 208296_x_at | 564 | 1073 | 1497 | TAGGGCTTCTTTTATGTTATCTTAA | Antisense | 4968 |
| 208296_x_at | 1109 | 261 | 1523 | AAGTGCTGGTGAATTTTCCATTTTT | Antisense | 4969 |
| 208296_x_at | 683 | 1145 | 1538 | TTCCATTTTTTACATCCATTTCACA | Antisense | 4970 |
| 208296_x_at | 857 | 593 | 1627 | GAAAGGTAACAATCTTCATTCTACA | Antisense | 4971 |
| 208296_x_at | 713 | 275 | 1727 | AATGCGTGCGTTTCAGTGTTTAAGA | Antisense | 4972 |
| 208296_x_at | 1046 | 297 | 1843 | CAAGCAGTTTGTGTGGTGTTTCTAT | Antisense | 4973 |
| 208296_x_at | 1051 | 201 | 1928 | AAATCTGCTGGCCAGCTATGTCCTC | Antisense | 4974 |
| 208296_x_at | 1016 | 1071 | 1953 | TAGGAAATGACAGACCCAACCACCA | Antisense | 4975 |
| 209606_at | 595 | 493 | 1164 | GAATTGCAAAACTGACATCCCATTT | Antisense | 4976 |
| 209606_at | 140 | 169 | 1174 | ACTGACATCCCATTTCACAGCAATA | Antisense | 4977 |
| 209606_at | 1008 | 309 | 1189 | CACAGCAATAGTGACCTTTATTTAA | Antisense | 4978 |
| 209606_at | 778 | 697 | 1217 | GTTGTGTTATAGTTTATGCTTCTTA | Antisense | 4979 |
| 209606_at | 422 | 1099 | 1249 | TTTCAACCTAAACAGCCAATTTCTA | Antisense | 4980 |
| 209606_at | 735 | 189 | 1260 | ACAGCCAATTTCTAAGCAGACAGGA | Antisense | 4981 |
| 209606_at | 240 | 1087 | 1369 | TATTTTCTAGATTATCCCTGTGAAT | Antisense | 4982 |
| 209606_at | 292 | 201 | 1485 | AAATCTTAGGTTTGCTTATGCCCAG | Antisense | 4983 |
| 209606_at | 775 | 499 | 1590 | GCTGTTTCTCACATCTATAGTGACA | Antisense | 4984 |
| 209606_at | 195 | 25 | 1639 | ATAGGAGGGGTTAAGGTTCATGAGA | Antisense | 4985 |
| 209606_at | 790 | 823 | 1679 | GGTCTGAGATGGGTGCTGCAAAGAT | Antisense | 4986 |
| 209613_s_at | 312 | 531 | 1839 | GCAGATTTCTTGCTTCATATGACAA | Antisense | 4987 |
| 209613_s_at | 279 | 57 | 1857 | ATGACAAAGCCTCAATTACTAATTG | Antisense | 4988 |
| 209613_s_at | 372 | 235 | 1891 | AACTATTCCCAGAATCATGTTCAAA | Antisense | 4989 |
| 209613_s_at | 712 | 593 | 1938 | GAAAGTGCTTCATTGACTAAACAGT | Antisense | 4990 |
| 209613_s_at | 179 | 595 | 2100 | GAAATGGCACAAACACCTTAAGCAA | Antisense | 4991 |
| 209613_s_at | 560 | 153 | 2114 | ACCTTAAGCAATATATTTTCCTAGT | Antisense | 4992 |
| 209613_s_at | 332 | 579 | 2209 | GAACTTTTCTATTAACTACCATGTC | Antisense | 4993 |
| 209613_s_at | 119 | 277 | 2296 | AATGCTTTGTTAATGCTTTTCCCAC | Antisense | 4994 |
| 209613_s_at | 582 | 365 | 2311 | CTTTTCCCACTCTCATTTGTTAATG | Antisense | 4995 |
| 209613_s_at | 383 | 837 | 2354 | GGATTTGCATTTTGAGCTTTATCTC | Antisense | 4996 |
| 209613_s_at | 147 | 515 | 2369 | GCTTTATCTCTAAATGTGACATGCA | Antisense | 4997 |
| 209774_x_at | 524 | 115 | 477 | AGAGAGACACAGCTGCAGAGGCCAC | Antisense | 4998 |
| 209774_x_at | 464 | 157 | 500 | ACCTGGATTGCGCCTAATGTGTTTG | Antisense | 4999 |
| 209774_x_at | 864 | 933 | 627 | TGATTGAATCTACTTGCACACTCTC | Antisense | 5000 |
| 209774_x_at | 256 | 541 | 642 | GCACACTCTCCCATTATATTTATTG | Antisense | 5001 |
| 209774_x_at | 1059 | 239 | 681 | AACCCAAGTTAGTTCAATCCTGATT | Antisense | 5002 |
| 209774_x_at | 486 | 561 | 725 | GAAGGTTTGCAGATATTCTCTAGTC | Antisense | 5003 |
| 209774_x_at | 232 | 607 | 773 | GACATATCACATGTCAGCCACTGTG | Antisense | 5004 |
| 209774_x_at | 1021 | 71 | 822 | ATGGCCAGTAAGATCAATGTGACGG | Antisense | 5005 |
| 209774_x_at | 628 | 919 | 839 | TGTGACGGCAGGGAAATGTATGTGT | Antisense | 5006 |
| 209774_x_at | 281 | 337 | 920 | CAGTGTGTGGTCAACATTTCTCATG | Antisense | 5007 |
| 209774_x_at | 889 | 61 | 1023 | ATGTTAATTATGCAGTGTTTCCCTC | Antisense | 5008 |
| 209795_at | 451 | 1071 | 1143 | TAGTCTAATTGAATCCCTTAAACTC | Antisense | 5009 |
| 209795_at | 691 | 67 | 1273 | ATGGGATGATCGTGTATTTATTTTT | Antisense | 5010 |
| 209795_at | 665 | 1107 | 1294 | TTTTTTACTTCCTCAGCTGTAGACA | Antisense | 5011 |
| 209795_at | 1000 | 177 | 1300 | ACTTCCTCAGCTGTAGACAGGTCCT | Antisense | 5012 |
| 209795_at | 563 | 603 | 1315 | GACAGGTCCTTTTCGATGGTACATA | Antisense | 5013 |
| 209795_at | 188 | 907 | 1331 | TGGTACATATTTCTTTGCCTTTATA | Antisense | 5014 |
| 209795_at | 302 | 1083 | 1352 | TATAATCTTTTATACAGTGTCTTAC | Antisense | 5015 |
| 209795_at | 1015 | 773 | 1450 | GTGATGTGGCAAATCTCTATTAGGA | Antisense | 5016 |
| 209795_at | 970 | 21 | 1476 | ATATTCTGTAATCTTCAGACCTAGA | Antisense | 5017 |
| 209795_at | 859 | 83 | 1520 | AGGTTTGTGACTTTCCTAAATCAAT | Antisense | 5018 |
| 209795_at | 232 | 1059 | 1550 | TACGTGCAATACTTCAATACTTCAT | Antisense | 5019 |
| 209894_at | 1074 | 877 | 4425 | GGCATAGGAACAGTTTTCTCTTCAT | Antisense | 5020 |
| 209894_at | 1099 | 289 | 4484 | AATTCAGTATTTGTCATTATGCAGT | Antisense | 5021 |
| 209894_at | 37 | 31 | 4515 | ATACCTACATAAGTCTATTCCATTA | Antisense | 5022 |
| 209894_at | 605 | 1111 | 4545 | TTTTGCGCTTGGCATATTTATTCCT | Antisense | 5023 |
| 209894_at | 841 | 141 | 4666 | AGCTGGGTATACCATTATTTCAAGT | Antisense | 5024 |
| 209894_at | 967 | 581 | 4761 | GAACACATTTTCTATAGCCCTTAAT | Antisense | 5025 |
| 209894_at | 1019 | 1081 | 4773 | TATAGCCCTTAATTTAGTTGTGTTA | Antisense | 5026 |
| 209894_at | 156 | 819 | 4807 | GGTGATGTATCAACAGCTTTTTTTT | Antisense | 5027 |
| 209894_at | 378 | 725 | 4863 | GTATGAATTGAGCTTTTTGCCCACA | Antisense | 5028 |
| 209894_at | 641 | 1111 | 4877 | TTTTGCCCACAGATTCTTGATTTGT | Antisense | 5029 |
| 209894_at | 899 | 357 | 4892 | CTTGATTTGTAGTTGTTTGGCAGGA | Antisense | 5030 |
| 210260_s_at | 1031 | 693 | 1244 | GATTGAGTCATCGACATTCAGGATT | Antisense | 5031 |
| 210260_s_at | 234 | 1 | 1263 | AGGATTTAAGTCTGAGGTAGTCAAC | Antisense | 5032 |
| 210260_s_at | 946 | 219 | 1300 | AAAAATGGCTTATCTGAAATCAGTA | Antisense | 5033 |
| 210260_s_at | 544 | 55 | 1376 | ATGCTTCTGGAATTGAGTTCTCCTT | Antisense | 5034 |
| 210260_s_at | 142 | 647 | 1390 | GAGTTCTCCTTTTAAGTACCAATGA | Antisense | 5035 |
| 210260_s_at | 855 | 923 | 1434 | TGTAATGGTGTGTCATTGCCTTGAA | Antisense | 5036 |
| 210260_s_at | 897 | 779 | 1443 | GTGTCATTGCCTTGAAATGCTTGCT | Antisense | 5037 |
| 210260_s_at | 276 | 949 | 1455 | TGAAATGCTTGCTTAGGGCTTCTTT | Antisense | 5038 |
| 210260_s_at | 86 | 223 | 1546 | AAAAGTCTAGATTGGTCTTGATATT | Antisense | 5039 |
| 210260_s_at | 748 | 293 | 1607 | CAATCTTCATTCTACAGATGAACTC | Antisense | 5040 |
| 210260_s_at | 833 | 493 | 1701 | GCGTGCGTTTCAGTGTTTAAGAAGG | Antisense | 5041 |
| 210538_s_at | 297 | 593 | 2493 | GAAAGTGTCCTATTTGTAGGAGTAC | Antisense | 5042 |
| 210538_s_at | 59 | 847 | 2511 | GGAGTACAATCAAGGGTACAGTTCG | Antisense | 5043 |
| 210538_s_at | 551 | 735 | 2526 | GTACAGTTCGTACATTTCTTTCATG | Antisense | 5044 |
| 210538_s_at | 135 | 27 | 2741 | ATAGGCTTTTGTTCTTATGAACGAA | Antisense | 5045 |
| 210538_s_at | 909 | 253 | 2767 | AAGAGGTAGCACTACAAACACAATA | Antisense | 5046 |
| 210538_s_at | 97 | 287 | 2871 | AATATTTTGGCATTGTACTAATACC | Antisense | 5047 |
| 210538_s_at | 727 | 873 | 2932 | GGCAGCATACTGAGACCCTGCCTTT | Antisense | 5048 |
| 210538_s_at | 456 | 221 | 2978 | AAAACACCAGGGACACATTTCTCTG | Antisense | 5049 |
| 210538_s_at | 512 | 337 | 2985 | CAGGGACACATTTCTCTGTCTTTTT | Antisense | 5050 |
| 210538_s_at | 821 | 1091 | 3008 | TTTGATCAGTGTCCTATACATCGAA | Antisense | 5051 |
| 210538_s_at | 935 | 759 | 3018 | GTCCTATACATCGAAGGTGTGCATA | Antisense | 5052 |
| 210915_x_at | 1077 | 205 | 516 | AAAGGCCACACTGGTGTGCCTGGCC | Antisense | 5053 |
| 210915_x_at | 1116 | 945 | 651 | TGACTCCAGATACTGCCTGAGCAGC | Antisense | 5054 |
| 210915_x_at | 928 | 985 | 722 | TCCGCTGTCAAGTCCAGTTCTACGG | Antisense | 5055 |
| 210915_x_at | 495 | 419 | 807 | CGCCGAGGCCTGGGGTAGAGCAGAC | Antisense | 5056 |
| 210915_x_at | 185 | 1067 | 822 | TAGAGCAGACTGTGGCTTTACCTCG | Antisense | 5057 |
| 210915_x_at | 1098 | 461 | 875 | CCACCATCCTCTATGAGATCCTGCT | Antisense | 5058 |
| 210915_x_at | 577 | 109 | 890 | AGATCCTGCTAGGGAAGGCCACCAT | Antisense | 5059 |
| 210915_x_at | 857 | 269 | 904 | AAGGCCACCATGTATGCTGTGCTGG | Antisense | 5060 |
| 210915_x_at | 145 | 419 | 933 | CGCCCTTGTGTTGATGGCCATGGTC | Antisense | 5061 |
| 210915_x_at | 224 | 137 | 1001 | AGCTTCTAACCCGTCATGGTTTCAA | Antisense | 5062 |
| 210915_x_at | 864 | 293 | 1023 | CAATACACATTCTTCTTTTGCCAGC | Antisense | 5063 |
| 210972_x_at | 474 | 861 | 514 | GGAACAAGACTTCAGGTCACGCTCG | Antisense | 5064 |
| 210972_x_at | 393 | 1021 | 525 | TCAGGTCACGCTCGATATCCAGAAC | Antisense | 5065 |
| 210972_x_at | 111 | 949 | 591 | TGACAAGTCTGTCTGCCTATTCACC | Antisense | 5066 |
| 210972_x_at | 583 | 633 | 711 | GAGCAACAGTGCTGTGGCCTGGAGC | Antisense | 5067 |
| 210972_x_at | 60 | 525 | 751 | GCATGTGCAAACGCCTTCAACAACA | Antisense | 5068 |
| 210972_x_at | 317 | 987 | 800 | TCCCCAGCCCAGAAAGTTCCTGTGA | Antisense | 5069 |
| 210972_x_at | 461 | 701 | 815 | GTTCCTGTGATGTCAAGCTGGTCGA | Antisense | 5070 |
| 210972_x_at | 1124 | 335 | 884 | CAGTGATTGGGTTCCGAATCCTCCT | Antisense | 5071 |
| 210972_x_at | 920 | 263 | 914 | AAGTGGCCGGGTTTAATCTGCTCAT | Antisense | 5072 |
| 210972_x_at | 1017 | 497 | 948 | GCTGTGGTCCAGCTGAGATCTGCAA | Antisense | 5073 |
| 210972_x_at | 49 | 695 | 973 | GATTGTAAGACAGCCTGTGCTCCCT | Antisense | 5074 |
| 211603_s_at | 522 | 821 | 1524 | GGTGCTGCCCTGTGTACATATAAAT | Antisense | 5075 |
| 211603_s_at | 740 | 817 | 1555 | GGTGTTGGGGAAACCTTCATCTGAA | Antisense | 5076 |
| 211603_s_at | 193 | 121 | 1634 | AGACTCTGAGCTGCTCACCGGAGTC | Antisense | 5077 |
| 211603_s_at | 960 | 501 | 1643 | GCTGCTCACCGGAGTCATTGGGAAG | Antisense | 5078 |
| 211603_s_at | 23 | 371 | 1690 | CTAGAGTCTCAGAAACTCCCCTGGG | Antisense | 5079 |
| 211603_s_at | 491 | 843 | 1732 | GGAGGAATTCAGCTCAGCTTCTTCC | Antisense | 5080 |
| 211603_s_at | 664 | 195 | 1797 | ACAAGAGTTTGTTCTGTTCTGGGGG | Antisense | 5081 |
| 211603_s_at | 444 | 995 | 1814 | TCTGGGGGACAGAGAAGGCGCTTCC | Antisense | 5082 |
| 211603_s_at | 991 | 515 | 1833 | GCTTCCCAACTTCATACTGGCAGGA | Antisense | 5083 |
| 211603_s_at | 540 | 819 | 1859 | GGTGAGGAGGTTCACTGAGCTCCCC | Antisense | 5084 |
| 211603_s_at | 718 | 421 | 1890 | CCCACTGCGGGGAGACAGAAGCCTG | Antisense | 5085 |
| 211700_s_at | 28 | 461 | 2132 | CCAGCACGGGCTTCAGTAGTGGACC | Antisense | 5086 |
| 211700_s_at | 703 | 853 | 2152 | GGACCCAGTTCTATTGTTGGCTTCA | Antisense | 5087 |
| 211700_s_at | 182 | 517 | 2171 | GCTTCAGCGGTGGACCAAGCACTGG | Antisense | 5088 |
| 211700_s_at | 495 | 467 | 2185 | CCAAGCACTGGTGTTGGCTTCTGCA | Antisense | 5089 |
| 211700_s_at | 805 | 91 | 2209 | AGTGGACCAAGCACCAGTGGCTTCA | Antisense | 5090 |
| 211700_s_at | 183 | 517 | 2228 | GCTTCAGCGGTGGACCGAGCACAGG | Antisense | 5091 |
| 211700_s_at | 777 | 435 | 2242 | CCGAGCACAGGAGCTGGCTTCGGCG | Antisense | 5092 |
| 211700_s_at | 1099 | 357 | 2259 | CTTCGGCGGTGGACCAAACACTGGT | Antisense | 5093 |
| 211700_s_at | 995 | 157 | 2301 | ACCGAGCACCAGTGCTGGCTTTGGC | Antisense | 5094 |
| 211700_s_at | 396 | 967 | 2313 | TGCTGGCTTTGGCAGTGGAGCCGCC | Antisense | 5095 |
| 211700_s_at | 1091 | 789 | 2351 | GTGGCTTCTCGTATGGCTAGTGAGG | Antisense | 5096 |
| 211796_s_at | 480 | 475 | 459 | GCCATCAGAAGCAGAGATCTCCCAC | Antisense | 5097 |
| 211796_s_at | 1017 | 445 | 618 | CCTCAATGACTCCAGATACTGCCTG | Antisense | 5098 |
| 211796_s_at | 464 | 295 | 621 | CAATGACTCCAGATACTGCCTGAGC | Antisense | 5099 |
| 211796_s_at | 927 | 985 | 695 | TCCGCTGTCAAGTCCAGTTCTACGG | Antisense | 5100 |
| 211796_s_at | 588 | 401 | 699 | CTGTCAAGTCCAGTTCTACGGGCTC | Antisense | 5101 |
| 211796_s_at | 538 | 331 | 709 | CAGTTCTACGGGCTCTCGGAGAATG | Antisense | 5102 |
| 211796_s_at | 612 | 995 | 724 | TCGGAGAATGACGAGTGGACCCAGG | Antisense | 5103 |
| 211796_s_at | 969 | 253 | 730 | AATGACGAGTGGACCCAGGATAGGG | Antisense | 5104 |
| 211796_s_at | 396 | 437 | 782 | CCGAGGCCTGGGGTAGAGCAGACTG | Antisense | 5105 |
| 211796_s_at | 704 | 439 | 788 | CCTGGGGTAGAGCAGACTGTGGCTT | Antisense | 5106 |
| 211796_s_at | 1147 | 937 | 917 | TGATGGCCATGGTCAAGAGAAAGGA | Antisense | 5107 |
| 212587_s_at | 989 | 851 | 1559 | GGAGCCAATCCATGCAGATATTTTG | Antisense | 5108 |
| 212587_s_at | 733 | 895 | 1630 | TGGCTGAATTTCAGAGCATCCCGCG | Antisense | 5109 |
| 212587_s_at | 761 | 571 | 1680 | GAAGCTCGAAAGCCCTTTAACCAGA | Antisense | 5110 |
| 212587_s_at | 838 | 61 | 1717 | ATGTTGACATTCTTCCTTATGATTA | Antisense | 5111 |
| 212587_s_at | 302 | 689 | 1737 | GATTATAACCGTGTTGAACTCTCTG | Antisense | 5112 |
| 212587_s_at | 1002 | 807 | 1779 | GGGTCAAACTACATAAATGCCAGCT | Antisense | 5113 |
| 212587_s_at | 745 | 1053 | 1833 | TACATTGCTGCACAAGGTCCCAGGG | Antisense | 5114 |
| 212587_s_at | 885 | 469 | 1902 | GCCACAGTTATTGTCATGGTCACTC | Antisense | 5115 |
| 212587_s_at | 523 | 263 | 1950 | AAGTGTGCAGAATACTGGCCGTCAA | Antisense | 5116 |
| 212587_s_at | 755 | 889 | 1966 | GGCCGTCAATGGAAGAGGGCACTCG | Antisense | 5117 |
| 212587_s_at | 613 | 83 | 1981 | AGGGCACTCGGGCTTTTGGAGATGT | Antisense | 5118 |
| 212588_at | 847 | 983 | 4070 | TCCTCCTTGTTCTACTCATATATAT | Antisense | 5119 |
| 212588_at | 346 | 705 | 4078 | GTTCTACTCATATATATCTATCTTA | Antisense | 5120 |
| 212588_at | 445 | 1077 | 4146 | TATGTGTGTGTATGCTACTACAAAA | Antisense | 5121 |
| 212588_at | 820 | 7 | 4206 | ATTCCATATATTAGCATTTAGTCCA | Antisense | 5122 |
| 212588_at | 436 | 521 | 4219 | GCATTTAGTCCAATGTCTTTTTAAG | Antisense | 5123 |
| 212588_at | 93 | 773 | 4267 | GTGAGCTTATCATGCTGTCTTTACA | Antisense | 5124 |
| 212588_at | 306 | 497 | 4280 | GCTGTCTTTACATGGGGTTTTCAAT | Antisense | 5125 |
| 212588_at | 469 | 713 | 4296 | GTTTTCAATTTTGCATGCTCGATTA | Antisense | 5126 |
| 212588_at | 725 | 53 | 4310 | ATGCTCGATTATTCCCTGTACAATA | Antisense | 5127 |
| 212588_at | 421 | 1089 | 4344 | TATTGCTTGATACTTTTGACAACAA | Antisense | 5128 |
| 212588_at | 462 | 5 | 4543 | ATTGCATATGCATAGTTCCCATGTT | Antisense | 5129 |
| 212592_at | 641 | 723 | 859 | GTATCAAAATCTTCCAATTATCATG | Antisense | 5130 |
| 212592_at | 937 | 39 | 867 | ATCTTCCAATTATCATGCTCACCTG | Antisense | 5131 |
| 212592_at | 25 | 975 | 871 | TCCAATTATCATGCTCACCTGAAAG | Antisense | 5132 |
| 212592_at | 92 | 509 | 883 | GCTCACCTGAAAGAGGTATGCTCTC | Antisense | 5133 |
| 212592_at | 880 | 657 | 895 | GAGGTATGCTCTCTTAGGAATACAG | Antisense | 5134 |
| 212592_at | 700 | 1073 | 909 | TAGGAATACAGTTTCTAGCATTAAA | Antisense | 5135 |
| 212592_at | 187 | 1035 | 985 | TAATAAAATGTTCCTCGCATTCCCC | Antisense | 5136 |
| 212592_at | 374 | 103 | 1088 | AGTTTCACTGTGTAGAGAACATATA | Antisense | 5137 |
| 212592_at | 317 | 27 | 1122 | ATAGGTCAATTATATGTCTCCATTA | Antisense | 5138 |
| 212592_at | 790 | 217 | 1164 | AAACATGTTCTAGAACTAGTTACAA | Antisense | 5139 |
| 212592_at | 384 | 199 | 1248 | AAATATATTTGGACATAACAGACTT | Antisense | 5140 |
| 212654_at | 304 | 815 | 804 | GGTGGCCGAGAGTAAATGTGGGGAC | Antisense | 5141 |
| 212654_at | 339 | 737 | 815 | GTAAATGTGGGGACCTAGAGGAGGA | Antisense | 5142 |
| 212654_at | 180 | 903 | 872 | TGGAGGCCCAGGCGGACAAGTATTC | Antisense | 5143 |
| 212654_at | 145 | 341 | 880 | CAGGCGGACAAGTATTCCACCAAAG | Antisense | 5144 |
| 212654_at | 339 | 673 | 1024 | GATGAAGTCTATGCCCAGAAGATGA | Antisense | 5145 |
| 212654_at | 447 | 77 | 1067 | AGGAACTGGACAACGCACTCAATGA | Antisense | 5146 |
| 212654_at | 592 | 599 | 1075 | GACAACGCACTCAATGACATCACCT | Antisense | 5147 |
| 212654_at | 541 | 981 | 1149 | TCCTTTCCATTCTCTCTATGGGGAG | Antisense | 5148 |
| 212654_at | 13 | 661 | 1186 | GAGGAGCAGAAATTGCCAACATTGC | Antisense | 5149 |
| 212654_at | 183 | 1147 | 1198 | TTGCCAACATTGCACAGCCAGGCTG | Antisense | 5150 |
| 212654_at | 208 | 405 | 1220 | CTGGGAGCAGCCTAGGGAGAGCCCC | Antisense | 5151 |
| 212671_s_at | 689 | 149 | 439 | ACCAATGAGGTTCCTGAGGTCACAG | Antisense | 5152 |
| 212671_s_at | 593 | 59 | 443 | ATGAGGTTCCTGAGGTCACAGTGTT | Antisense | 5153 |
| 212671_s_at | 710 | 83 | 446 | AGGTTCCTGAGGTCACAGTGTTTTC | Antisense | 5154 |
| 212671_s_at | 604 | 983 | 450 | TCCTGAGGTCACAGTGTTTTCCAAG | Antisense | 5155 |
| 212671_s_at | 458 | 749 | 512 | GTCTTGTGGACAACATCTTTCCTCC | Antisense | 5156 |
| 212671_s_at | 615 | 383 | 604 | CTCTCCAAGAGTGATCATTCCTTCT | Antisense | 5157 |
| 212671_s_at | 807 | 467 | 608 | CCAAGAGTGATCATTCCTTCTTCAA | Antisense | 5158 |
| 212671_s_at | 232 | 113 | 611 | AGAGTGATCATTCCTTCTTCAAGAT | Antisense | 5159 |
| 212671_s_at | 793 | 93 | 613 | AGTGATCATTCCTTCTTCAAGATCA | Antisense | 5160 |
| 212671_s_at | 731 | 671 | 664 | GATGAGATTTATGACTGCAAGGTGG | Antisense | 5161 |
| 212671_s_at | 573 | 443 | 709 | CCTCTTCTGAAACACTGGGAGCCTG | Antisense | 5162 |
| 212813_at | 717 | 839 | 2297 | GGATGCTTAGCATGCAAGTTCCCTC | Antisense | 5163 |
| 212813_at | 955 | 389 | 2319 | CTCCATCATTGCCACCTTGGTAGAG | Antisense | 5164 |
| 212813_at | 300 | 907 | 2336 | TGGTAGAGAGGGATGGCTCCCCACC | Antisense | 5165 |
| 212813_at | 462 | 463 | 2356 | CCACCCTCAGCGTTGGGGATTCACG | Antisense | 5166 |
| 212813_at | 902 | 443 | 2387 | CCTCCTTCTTGGTTGTCATAGTGAT | Antisense | 5167 |
| 212813_at | 908 | 773 | 2407 | GTGATAGGGTAGCCTTATTGCCCCC | Antisense | 5168 |
| 212813_at | 33 | 1007 | 2453 | TCTACACTAGTGCCATGGGAACCAG | Antisense | 5169 |
| 212813_at | 55 | 771 | 2579 | GTGACTCAAGACTCGAGGCCGATAC | Antisense | 5170 |
| 212813_at | 978 | 483 | 2596 | GCCGATACGAGGCTGTGATTCTGCC | Antisense | 5171 |
| 212813_at | 188 | 693 | 2612 | GATTCTGCCTTTGGATGGATGTTGC | Antisense | 5172 |
| 212813_at | 236 | 1053 | 2650 | TACAGACTTGTACTAACACACCGTA | Antisense | 5173 |
| 213193_x_at | 1117 | 945 | 664 | TGACTCCAGATACTGCCTGAGCAGC | Antisense | 5174 |
| 213193_x_at | 926 | 985 | 735 | TCCGCTGTCAAGTCCAGTTCTACGG | Antisense | 5175 |
| 213193_x_at | 186 | 1067 | 835 | TAGAGCAGACTGTGGCTTTACCTCG | Antisense | 5176 |
| 213193_x_at | 1097 | 461 | 888 | CCACCATCCTCTATGAGATCCTGCT | Antisense | 5177 |
| 213193_x_at | 254 | 643 | 902 | GAGATCCTGCTAGGGAAGGCCACCC | Antisense | 5178 |
| 213193_x_at | 74 | 319 | 922 | CACCCTGTATGCTGTGCTGGTCAGC | Antisense | 5179 |
| 213193_x_at | 863 | 293 | 1036 | CAATACACATTCTTCTTTTGCCAGC | Antisense | 5180 |
| 213193_x_at | 1099 | 471 | 1055 | GCCAGCGCTTCTGAAGAGCTGCTCT | Antisense | 5181 |
| 213193_x_at | 522 | 155 | 1081 | ACCTCTCTGCATCCCAATAGATATC | Antisense | 5182 |
| 213193_x_at | 717 | 283 | 1096 | AATAGATATCCCCCTATGTGCATGC | Antisense | 5183 |
| 213193_x_at | 782 | 811 | 1158 | GGGGGACCTTAGCATGCCTAAGTGA | Antisense | 5184 |
| 213539_at | 163 | 799 | 265 | GGGAACACTGCTCTCAGACATTACA | Antisense | 5185 |
| 213539_at | 711 | 613 | 291 | GACTGGACCTGGGAAAACGCATCCT | Antisense | 5186 |
| 213539_at | 701 | 417 | 308 | CGCATCCTGGACCCACGAGGAATAT | Antisense | 5187 |
| 213539_at | 383 | 553 | 368 | GAATCTACCGTGCAAGTTCATTATC | Antisense | 5188 |
| 213539_at | 835 | 781 | 408 | GTGTGGAGCTGGATCCAGCCACCGT | Antisense | 5189 |
| 213539_at | 610 | 119 | 507 | AGACTGGAAGGCTGTCTGGGGCTGC | Antisense | 5190 |
| 213539_at | 108 | 971 | 529 | TGCCGACACACAAGCTCTGTTGAGG | Antisense | 5191 |
| 213539_at | 964 | 867 | 552 | GGAATGACCAGGTCTATCAGCCCCT | Antisense | 5192 |
| 213539_at | 659 | 145 | 570 | AGCCCCTCCGAGATCGAGATGATGC | Antisense | 5193 |
| 213539_at | 1113 | 961 | 592 | TGCTCAGTACAGCCACCTTGGAGGA | Antisense | 5194 |
| 213539_at | 892 | 569 | 659 | GAAGCAGCCATTACCAACTGTACCT | Antisense | 5195 |
| 213790_at | 850 | 717 | 1130 | GTTTGAGTTTTGTAGGGCCATCACC | Antisense | 5196 |
| 213790_at | 16 | 793 | 1144 | GGGCCATCACCTGGAAAGTCAATGT | Antisense | 5197 |
| 213790_at | 719 | 373 | 1194 | CTACTTTTCTTCCTACAGCTTATTA | Antisense | 5198 |
| 213790_at | 619 | 727 | 1224 | GTAGGTTCTATGACCTCACTTCATG | Antisense | 5199 |
| 213790_at | 83 | 313 | 1240 | CACTTCATGGGTTCCAGGCAATTCC | Antisense | 5200 |
| 213790_at | 478 | 547 | 1257 | GCAATTCCGCTGAAAGGTTTGTCTC | Antisense | 5201 |
| 213790_at | 709 | 573 | 1345 | GAAGCCTAACATTCTCCATTGTGGA | Antisense | 5202 |
| 213790_at | 854 | 1105 | 1404 | TTTTTCCAGCTTACACATGTGGGAT | Antisense | 5203 |
| 213790_at | 979 | 847 | 1468 | GGAGAGTCAATACTCCTGACGAGTC | Antisense | 5204 |
| 213790_at | 86 | 813 | 1500 | GGGGCATTTTTATGCCTTCTTAACT | Antisense | 5205 |
| 213790_at | 942 | 883 | 1540 | GGCTGAACTATAGGCCATTGTTCCC | Antisense | 5206 |
| 214470_at | 865 | 831 | 172 | GGTTCACCTTGGCATCAATTTGCCC | Antisense | 5207 |
| 214470_at | 556 | 1095 | 190 | TTTGCCCTGAAACTTAGCTGTGCTG | Antisense | 5208 |
| 214470_at | 660 | 141 | 205 | AGCTGTGCTGGGATTATTCTCCTTG | Antisense | 5209 |
| 214470_at | 519 | 9 | 220 | ATTCTCCTTGTCTTGGTTGTTACTG | Antisense | 5210 |
| 214470_at | 1064 | 805 | 244 | GGGTTGAGTGTTTCAGTGACATCCT | Antisense | 5211 |
| 214470_at | 1050 | 437 | 340 | CCGGGTCTCTTAAACTGCCCAATAT | Antisense | 5212 |
| 214470_at | 1032 | 929 | 392 | TGTTATTTTCTCACACTGTCAACCC | Antisense | 5213 |
| 214470_at | 965 | 229 | 424 | AACAGTCTAGCTGATTGTTCCACCA | Antisense | 5214 |
| 214470_at | 59 | 1153 | 438 | TTGTTCCACCAAAGAATCCAGCCTG | Antisense | 5215 |
| 214470_at | 186 | 977 | 454 | TCCAGCCTGCTGCTTATTCGAGATA | Antisense | 5216 |
| 214470_at | 1161 | 219 | 632 | AAAACAGCTGTATTTCCATCTCACA | Antisense | 5217 |
| 215313_x_at | 921 | 941 | 902 | TGAGATGGGAGCTGTCTTCCCAGCC | Antisense | 5218 |
| 215313_x_at | 649 | 347 | 936 | CATCGTGGGCATCATTGCTGGCCTG | Antisense | 5219 |
| 215313_x_at | 825 | 935 | 977 | TGATCACTGGAGCTGTGGTCGCTGC | Antisense | 5220 |
| 215313_x_at | 305 | 757 | 994 | GTCGCTGCCGTGATGTGGAGGAGGA | Antisense | 5221 |
| 215313_x_at | 1053 | 883 | 1071 | GGCTGCAAGCAGTGACAGTGCCCAG | Antisense | 5222 |
| 215313_x_at | 582 | 121 | 1131 | AGACAGCTGCCTTGTGTGGGACTGA | Antisense | 5223 |
| 215313_x_at | 475 | 569 | 1193 | GAAGAACCCTGACTTTGTTTCTGCA | Antisense | 5224 |
| 215313_x_at | 837 | 959 | 1226 | TGCATGTGTCTGTGTTCGTGTAGGC | Antisense | 5225 |
| 215313_x_at | 1069 | 293 | 1331 | CAATCATCTTTCCTGTTCCAGAGAG | Antisense | 5226 |
| 215313_x_at | 124 | 349 | 1374 | CATCTCTGTCTCAACTTCATGGTGC | Antisense | 5227 |
| 215313_x_at | 634 | 907 | 1393 | TGGTGCACTGAGCTGTAACTTCTTC | Antisense | 5228 |
| 216438_s_at | 1086 | 185 | 150 | ACAGAGACGCAAGAGAAAAATCCAC | Antisense | 5229 |
| 216438_s_at | 546 | 277 | 168 | AATCCACTGCCTTCCAAAGAAACGA | Antisense | 5230 |
| 216438_s_at | 138 | 315 | 172 | CACTGCCTTCCAAAGAAACGATTGA | Antisense | 5231 |
| 216438_s_at | 670 | 849 | 200 | GGAGAAGCAAGCAGGCGAATCGTAA | Antisense | 5232 |
| 216438_s_at | 49 | 135 | 209 | AGCAGGCGAATCGTAATGAGGCGTG | Antisense | 5233 |
| 216438_s_at | 556 | 957 | 245 | TGCACTGTACATTCCACAAGCATTG | Antisense | 5234 |
| 216438_s_at | 569 | 167 | 248 | ACTGTACATTCCACAAGCATTGCCT | Antisense | 5235 |
| 216438_s_at | 9 | 109 | 308 | AGATGCAAAGAGGTTGGATCAAGTT | Antisense | 5236 |
| 216438_s_at | 178 | 259 | 328 | AAGTTTAAATGACTGTGCTGCCCCT | Antisense | 5237 |
| 216438_s_at | 744 | 591 | 426 | GAAAGAACTTGCATGTTGGTGAAGG | Antisense | 5238 |
| 216438_s_at | 432 | 499 | 516 | GCTGTAATGCAGTTTAATCAGAGTG | Antisense | 5239 |
| 216920_s_at | 416 | 313 | 881 | CACTACTGCTGCAGCTCACAAACAC | Antisense | 5240 |
| 216920_s_at | 585 | 509 | 894 | GCTCACAAACACCTCTGCATATTAC | Antisense | 5241 |
| 216920_s_at | 504 | 1001 | 907 | TCTGCATATTACATGTACCTCCTCC | Antisense | 5242 |
| 216920_s_at | 513 | 783 | 944 | GTGTGGTCTATTTTGCCATCATCAC | Antisense | 5243 |
| 216920_s_at | 940 | 891 | 1115 | GGCCATTTCAGTTCTCATGTGTGTA | Antisense | 5244 |
| 216920_s_at | 978 | 829 | 1161 | GGTTTTCAAACCAGTGGGCACACAG | Antisense | 5245 |
| 216920_s_at | 584 | 989 | 1323 | TCCCTCTCTTAGTGTTCTTTAATCA | Antisense | 5246 |
| 216920_s_at | 126 | 35 | 1349 | ATAACTGCCTGGAAGCCTTTCATTT | Antisense | 5247 |
| 216920_s_at | 170 | 897 | 1358 | TGGAAGCCTTTCATTTTACACGCCC | Antisense | 5248 |
| 216920_s_at | 1055 | 417 | 1378 | CGCCCTGAAGCAGTCTTCTTTGCTA | Antisense | 5249 |
| 216920_s_at | 1041 | 1115 | 1409 | TTATGTGGTGTGTTTTTCCGTAATA | Antisense | 5250 |
| 217767_at | 461 | 823 | 4506 | GGTCTACGCCTATTACAACCTGGAG | Antisense | 5251 |
| 217767_at | 1003 | 247 | 4582 | AAGCTCTGCCGTGATGAACTGTGCC | Antisense | 5252 |
| 217767_at | 579 | 577 | 4663 | GAACGGCTGGACAAGGCCTGTGAGC | Antisense | 5253 |
| 217767_at | 98 | 833 | 4725 | GGTTCAGCTGTCCAATGACTTTGAC | Antisense | 5254 |
| 217767_at | 994 | 531 | 4770 | GCAGACCATCAAGTCAGGCTCGGAT | Antisense | 5255 |
| 217767_at | 382 | 1017 | 4823 | TCATCAGCCCCATCAAGTGCAGAGA | Antisense | 5256 |
| 217767_at | 347 | 227 | 4871 | AACACTACCTCATGTGGGGTCTCTC | Antisense | 5257 |
| 217767_at | 848 | 751 | 4889 | GTCTCTCCTCCGATTTCTGGGGAGA | Antisense | 5258 |
| 217767_at | 1105 | 787 | 4954 | GTGGAGCACTGGCCTGAGGAGGACG | Antisense | 5259 |
| 217767_at | 105 | 123 | 5000 | AGAAACAATGCCAGGACCTCGGCGC | Antisense | 5260 |
| 217767_at | 589 | 419 | 5022 | CGCCTTCACCGAGAGCATGGTTGTC | Antisense | 5261 |
| 218499_at | 1142 | 271 | 2607 | AATGTTTAATTGTTTGGATCTGCAC | Antisense | 5262 |
| 218499_at | 539 | 839 | 2622 | GGATCTGCACAGTTTGGTTTTTGCA | Antisense | 5263 |
| 218499_at | 302 | 159 | 2716 | ACAGTTTTTAGTCAAAGTGGCCATT | Antisense | 5264 |
| 218499_at | 1129 | 289 | 2808 | AATTCTTTTTATTGGTGCCTATATT | Antisense | 5265 |
| 218499_at | 850 | 1129 | 2873 | TTCAGTTAAATTTTTCACCTGCTGT | Antisense | 5266 |
| 218499_at | 832 | 847 | 2942 | GGAGATAATTTTGCAACTCATGTTA | Antisense | 5267 |
| 218499_at | 444 | 175 | 3028 | ACTTTACAACACAATTGCATCCCAA | Antisense | 5268 |
| 218499_at | 24 | 1089 | 3070 | TATTCATTATAGCTATTCGTCCTGT | Antisense | 5269 |
| 218499_at | 499 | 1089 | 3083 | TATTCGTCCTGTAATCTGTTTCTAG | Antisense | 5270 |
| 218499_at | 957 | 715 | 3100 | GTTTCTAGGTGAAGCATACTCCAGT | Antisense | 5271 |
| 218499_at | 528 | 519 | 3113 | GCATACTCCAGTGTTTTAGGGGTTT | Antisense | 5272 |
| 218805_at | 459 | 1049 | 1237 | TAAATCTCTGGACCCTGGAGCACTT | Antisense | 5273 |
| 218805_at | 2 | 903 | 1252 | TGGAGCACTTCTAATGTATCACCCC | Antisense | 5274 |
| 218805_at | 1057 | 721 | 1267 | GTATCACCCCATGGAGTCATTGTTC | Antisense | 5275 |
| 218805_at | 1042 | 611 | 1309 | GACTCAGATCCTCGTGGTCTATGGA | Antisense | 5276 |
| 218805_at | 1072 | 987 | 1366 | TCCCCTTCTTCCTGATAGACTTGGA | Antisense | 5277 |
| 218805_at | 377 | 971 | 1414 | TGCCTGCCTGCTGTAAACACTATTC | Antisense | 5278 |
| 218805_at | 274 | 997 | 1442 | TCTGTCTGCCAACAACTGCTTCAGG | Antisense | 5279 |
| 218805_at | 121 | 451 | 1540 | CCTTAGATAGAACCTGTCTTCCTCC | Antisense | 5280 |
| 218805_at | 482 | 387 | 1561 | CTCCCTGGCATTGTGGGGTCTGGGC | Antisense | 5281 |
| 218805_at | 136 | 369 | 1608 | CTTTGTGCTGCCAACCTGAGATTGA | Antisense | 5282 |
| 218805_at | 814 | 1079 | 1705 | TATCTCCGCATTTCCAGTTGTATTA | Antisense | 5283 |
| 218807_at | 1032 | 969 | 4366 | TGCCGTCAGCCGAACTTTGTTATGG | Antisense | 5284 |
| 218807_at | 727 | 903 | 4388 | TGGAGGGAGCAGCCTCACACAAGCA | Antisense | 5285 |
| 218807_at | 584 | 587 | 4413 | GAAACACTCCTGTGGATGGTATTGT | Antisense | 5286 |
| 218807_at | 1142 | 1067 | 4456 | TAGTCAATAGACCCTCTCCTTATAA | Antisense | 5287 |
| 218807_at | 255 | 531 | 4529 | GCAGAGGATATTGGAGCCCCTTTTT | Antisense | 5288 |
| 218807_at | 886 | 53 | 4543 | AGCCCCTTTTTGTGACATTACCAAT | Antisense | 5289 |
| 218807_at | 639 | 1063 | 4561 | TACCAATTACATCTTTGTCCACGTT | Antisense | 5290 |
| 218807_at | 420 | 921 | 4576 | TGTCCACGTTTAATACTTTGTTTTG | Antisense | 5291 |
| 218807_at | 77 | 63 | 4656 | ATGTTTTCCATATACTTTGTCTTGC | Antisense | 5292 |
| 218807_at | 752 | 1055 | 4668 | TACTTTGTCTTGCCTGTATGCAGCC | Antisense | 5293 |
| 218807_at | 355 | 723 | 4683 | GTATGCAGCCCTTGTGTAATATGGT | Antisense | 5294 |
| 222838_at | 228 | 229 | 2352 | AACACCTGTGCTAGGTCAGTCTGGC | Antisense | 5295 |
| 222838_at | 971 | 509 | 2361 | GCTAGGTCAGTCTGGCACGTAAGAT | Antisense | 5296 |
| 222838_at | 805 | 755 | 2370 | GTCTGGCACGTAAGATGAACATCCC | Antisense | 5297 |
| 222838_at | 1054 | 1039 | 2380 | TAAGATGAACATCCCTACCAACACA | Antisense | 5298 |
| 222838_at | 728 | 629 | 2405 | GAGCTCACCATCTCTTATACTTAAG | Antisense | 5299 |
| 222838_at | 821 | 61 | 2473 | ATGTTCCCTGACACATATCTTGAAT | Antisense | 5300 |
| 222838_at | 479 | 179 | 2485 | ACATATCTTGAATGGAGACCTCCCT | Antisense | 5301 |
| 222838_at | 379 | 119 | 2500 | AGACCTCCCTACCAAGTGATGAAAG | Antisense | 5302 |
| 222838_at | 520 | 805 | 2565 | GGGATTGAGGATTATCTTCTCTCAG | Antisense | 5303 |
| 222838_at | 382 | 1013 | 2579 | TCTTCTCTCAGAAAGGCATTGTGAA | Antisense | 5304 |
| 222838_at | 797 | 447 | 2626 | CCTACTGCAAAACCCTATTGTAGTA | Antisense | 5305 |
| 222943_at | 191 | 561 | 1738 | GAAGAGAAAACCACTAACCTTGATT | Antisense | 5306 |
| 222943_at | 1056 | 243 | 1855 | AACCATGATTTGCAACTGTAACAGG | Antisense | 5307 |
| 222943_at | 511 | 623 | 1881 | GACCATTTATTATAAGCGTACCTGT | Antisense | 5308 |
| 222943_at | 16 | 247 | 1894 | AAGCGTACCTGTTTGTGAACTTAAT | Antisense | 5309 |
| 222943_at | 812 | 499 | 1935 | GCTGTTTTTGCTTAGGTGATCCACT | Antisense | 5310 |
| 222943_at | 838 | 51 | 1953 | ATCCACTGCCATGTGATCCATAATT | Antisense | 5311 |
| 222943_at | 119 | 775 | 1965 | GTGATCCATAATTTTTCTACATAAA | Antisense | 5312 |
| 222943_at | 535 | 1007 | 2055 | TCTACTTGTTAATATATTCGGCCCA | Antisense | 5313 |
| 222943_at | 304 | 9 | 2070 | ATTCGGCCCATATTTTGTGTGTTTG | Antisense | 5314 |
| 222943_at | 1105 | 781 | 2086 | GTGTGTTTGGACAAGTACATCTCCC | Antisense | 5315 |
| 222943_at | 813 | 1003 | 2105 | TCTCCCTTTTGCCTAATGAACTTTT | Antisense | 5316 |
| 223403_s_at | 938 | 353 | 1845 | CATTACCAGGTTACTCTTGAGATTT | Antisense | 5317 |
| 223403_s_at | 582 | 709 | 1879 | GTTAGAACTCTCAACCAAGACCTGA | Antisense | 5318 |
| 223403_s_at | 445 | 725 | 1911 | GTATGCAAGGTTTCTGAATCTCTCT | Antisense | 5319 |
| 223403_s_at | 603 | 705 | 1974 | GTTCAAAAAGTTCATGTCTTCTCAA | Antisense | 5320 |
| 223403_s_at | 959 | 865 | 2019 | GGAAGAGCATACGGTGACAAGTCTC | Antisense | 5321 |
| 223403_s_at | 338 | 191 | 2097 | ACACCTGTTAATCCATCTTGAGCAG | Antisense | 5322 |
| 223403_s_at | 703 | 41 | 2111 | ATCTTGAGCAGGACAGTACTATACA | Antisense | 5323 |
| 223403_s_at | 253 | 1087 | 2165 | TATTTTCTTATAGCCACGTTGAAGT | Antisense | 5324 |
| 223403_s_at | 234 | 1053 | 2203 | TACAGTGTTTTTTACCAGCTTTATA | Antisense | 5325 |
| 223403_s_at | 300 | 667 | 2264 | GATGGGTCTGACTATATGCACACAC | Antisense | 5326 |
| 223403_s_at | 1064 | 55 | 2279 | ATGCACACACCTTTGATACCATCAC | Antisense | 5327 |
| 223593_at | 41 | 875 | 1467 | GGCAGCTGCAGACAAGTGGTTAACT | Antisense | 5328 |
| 223593_at | 336 | 595 | 1477 | GACAAGTGGTTAACTGGTTTGGCAG | Antisense | 5329 |
| 223593_at | 920 | 1159 | 1495 | TTGGCAGAATGGCATGTTCCTGCTG | Antisense | 5330 |
| 223593_at | 255 | 667 | 1593 | GATGGGGGTATTAATGCTCCCTGGA | Antisense | 5331 |
| 223593_at | 9 | 505 | 1608 | GCTCCCTGGAAATGCTTTCTACGTC | Antisense | 5332 |
| 223593_at | 1103 | 371 | 1626 | CTACGTCGATAGCTCAGCTCCTAGC | Antisense | 5333 |
| 223593_at | 458 | 981 | 1644 | TCCTAGCCCTTACTTGAGAGCATCC | Antisense | 5334 |
| 223593_at | 768 | 667 | 1696 | GATGTGGCCTTCCAGGTATTAGCAC | Antisense | 5335 |
| 223593_at | 444 | 891 | 1701 | GGCCTTCCAGGTATTAGCACAACTT | Antisense | 5336 |
| 223593_at | 635 | 171 | 1884 | ACTCTGGCCTGCATGGCAGAACAAG | Antisense | 5337 |
| 223593_at | 445 | 201 | 1934 | AAATCAAACTAATCATGCTGCTCAT | Antisense | 5338 |
| 224896_s_at | 643 | 1001 | 3108 | TTCCCCAAAACTCAACTCCTATGGC | Antisense | 5339 |
| 224896_s_at | 581 | 869 | 3130 | GGCAATTATGAACTCCATTTTACCA | Antisense | 5340 |
| 224896_s_at | 927 | 251 | 3154 | AAGAACATTTAAGTGCCTCAGCATC | Antisense | 5341 |
| 224896_s_at | 670 | 261 | 3164 | AAGTGCCTCAGCATCTGTATGATAT | Antisense | 5342 |
| 224896_s_at | 13 | 27 | 3207 | ATAGGTACCAGCTGACATGATGTGT | Antisense | 5343 |
| 224896_s_at | 22 | 669 | 3225 | GATGTGTCACTAGCTCTGTGGGATG | Antisense | 5344 |
| 224896_s_at | 913 | 183 | 3260 | ACATGGAACACCTGGGAGTGCTGGA | Antisense | 5345 |
| 224896_s_at | 1162 | 761 | 3277 | GTGCTGGAAATGTACTGGGATCGAA | Antisense | 5346 |
| 224896_s_at | 940 | 181 | 3397 | ACATGGGCACCGGAGTAGGTCCCGT | Antisense | 5347 |
| 224896_s_at | 451 | 335 | 3450 | CAGTGACGTACATGGCTCTGGTTCT | Antisense | 5348 |
| 224896_s_at | 577 | 833 | 3469 | GGTTCTGGACACAAAATCTGTACTG | Antisense | 5349 |
| 224908_s_at | 277 | 149 | 2301 | ACCAAGCCTGGCTTTATGTATTTAT | Antisense | 5350 |
| 224908_s_at | 343 | 187 | 2387 | ACAGAAGGTTATGCCTGGCTCCCAG | Antisense | 5351 |
| 224908_s_at | 348 | 909 | 2454 | TGGGGGAGGAGTCATGGTTTATTTG | Antisense | 5352 |
| 224908_s_at | 558 | 969 | 2549 | TGCCTTAGTTTCTTAGCCCATGAAA | Antisense | 5353 |
| 224908_s_at | 500 | 619 | 2587 | GACCCAGGGACTACCTCAAGGGCTT | Antisense | 5354 |
| 224908_s_at | 1051 | 865 | 2634 | GGAAGATGCAAGAGCCTTTAGTACC | Antisense | 5355 |
| 224908_s_at | 192 | 117 | 2644 | AGAGCCTTTAGTACCAAGGTTCTCA | Antisense | 5356 |
| 224908_s_at | 658 | 425 | 2738 | CCCGGACAGTTAAATCAGAACCTCA | Antisense | 5357 |
| 224908_s_at | 811 | 327 | 2753 | CAGAACCTCAGACAGCAATATGCCT | Antisense | 5358 |
| 224908_s_at | 319 | 21 | 2770 | ATATGCCTTGAGATGCCTTGAACCA | Antisense | 5359 |
| 224908_s_at | 464 | 643 | 2779 | GAGATGCCTTGAACCATGCTTGAGA | Antisense | 5360 |
| 225502_at | 1153 | 571 | 5134 | GAAGCCTTACTACAATTCCAAAAAT | Antisense | 5361 |
| 225502_at | 895 | 39 | 5157 | ATCATCATGGTTGGAAATTTGGGAG | Antisense | 5362 |
| 225502_at | 522 | 1085 | 5187 | TATTTGTGAACTTGTTACCCTTTTG | Antisense | 5363 |
| 225502_at | 162 | 741 | 5212 | GTAATGGTGGACTAATTGCTGTATA | Antisense | 5364 |
| 225502_at | 885 | 1051 | 5319 | TACACGGTACTTGGAGCAGTCAGCC | Antisense | 5365 |
| 225502_at | 659 | 1029 | 5349 | TCACAGATACTGCTTTCACTTAAAT | Antisense | 5366 |
| 225502_at | 87 | 291 | 5380 | AATTCTCCGATAATGCTTTGCTTTT | Antisense | 5367 |
| 225502_at | 1017 | 743 | 5413 | GTCACTCTTGTGTACTATCTATTTT | Antisense | 5368 |
| 225502_at | 324 | 1159 | 5420 | TTGTGTACTATCTATTTTTCTCCTC | Antisense | 5369 |
| 225502_at | 283 | 251 | 5469 | AAGCAATAATATCTCTGTTTTCATT | Antisense | 5370 |
| 225502_at | 218 | 45 | 5479 | ATCTCTGTTTTCATTTCAGAACATT | Antisense | 5371 |
| 225882_at | 1108 | 535 | 2178 | GCACCTTACATATTTGATGCTCAGG | Antisense | 5372 |
| 225882_at | 944 | 461 | 2283 | CCACCCTTACATCTCCATAGTTGGT | Antisense | 5373 |
| 225882_at | 1067 | 695 | 2302 | GTTGGTACAGTTAGCTTGTAGCAGC | Antisense | 5374 |
| 225882_at | 561 | 51 | 2335 | ATGCCTGGAGATCACTGTCTGTTGG | Antisense | 5375 |
| 225882_at | 429 | 401 | 2349 | CTGTCTGTTGGTCTGATCTCAGTAT | Antisense | 5376 |
| 225882_at | 844 | 333 | 2368 | CAGTATCATACTGAGACACCTCCCC | Antisense | 5377 |
| 225882_at | 909 | 441 | 2391 | CCTGAGCCTTACCTACTTAAATTGG | Antisense | 5378 |
| 225882_at | 899 | 661 | 2453 | GAGGCAAGTTGCAAGGGAGCCAGAG | Antisense | 5379 |
| 225882_at | 841 | 285 | 2534 | AATTTCTTTGGCACATTGACTTACT | Antisense | 5380 |
| 225882_at | 169 | 873 | 2543 | GGCACATTGACTTACTGATATCTTT | Antisense | 5381 |
| 225882_at | 408 | 1001 | 2614 | TATTCCCCGGCGCAATAAAAATGCC | Antisense | 5382 |
| 226218_at | 938 | 375 | 979 | CTAATTGGTTCTGCCCAATCTCCTT | Antisense | 5383 |
| 226218_at | 739 | 943 | 1126 | TGACTGGGTCTAGGGCACCCAGGCT | Antisense | 5384 |
| 226218_at | 810 | 691 | 1151 | GATTCAGCTGATTTCCTACCAGCCT | Antisense | 5385 |
| 226218_at | 730 | 1075 | 1229 | TATGGGCTGTTCAGAGGTGCACACC | Antisense | 5386 |
| 226218_at | 1063 | 249 | 1283 | AAGAGACTTGGTACGGGCCAGGAAG | Antisense | 5387 |
| 226218_at | 819 | 551 | 1307 | GAATATGTGGCAGAGCTCCTGGAAA | Antisense | 5388 |
| 226218_at | 949 | 1073 | 1342 | TAGGTGGCATTTTTGTCAGCTCTGT | Antisense | 5389 |
| 226218_at | 721 | 745 | 1356 | GTCAGCTCTGTGGTTTATTGTTGGG | Antisense | 5390 |
| 226218_at | 938 | 199 | 1392 | AAATATCCATTGTTCACTACAGTGA | Antisense | 5391 |
| 226218_at | 984 | 157 | 1431 | ACCGTGTACTATCCACATGCATTAC | Antisense | 5392 |
| 226218_at | 64 | 13 | 1451 | ATTACAAACATTTCGCAGAGCTGCT | Antisense | 5393 |
| 226219_at | 896 | 751 | 1088 | GTCTCCGACACAAAGCACTTATCTC | Antisense | 5394 |
| 226219_at | 539 | 539 | 1102 | GCACTTATCTCTTAGGAGATTCCCA | Antisense | 5395 |
| 226219_at | 56 | 109 | 1139 | AGATCTTGTTCCCAGGGAGTGGGTC | Antisense | 5396 |
| 226219_at | 447 | 983 | 1241 | TCCTCTGAGCTGTGAATCTCTCTTC | Antisense | 5397 |
| 226219_at | 93 | 217 | 1323 | AAACACTTCTAGAGTTGCCCATTCC | Antisense | 5398 |
| 226219_at | 933 | 487 | 1339 | GCCCATTCCTGTTATGTTCTTGGAC | Antisense | 5399 |
| 226219_at | 527 | 705 | 1354 | GTTCTTGGACCCTAAGATACCTCCT | Antisense | 5400 |
| 226219_at | 599 | 1151 | 1424 | TTGAAGCCCTCAATATTTGTTGGAG | Antisense | 5401 |
| 226219_at | 753 | 767 | 1496 | GTGCAAGAGAGGTCCTGTACAGATC | Antisense | 5402 |
| 226219_at | 1151 | 1001 | 1530 | TCTCCTTTCTCCTTTGGAATAACTT | Antisense | 5403 |
| 226219_at | 537 | 465 | 1623 | CCACAGGTCCCACTCTAGTGAAGGT | Antisense | 5404 |
| 227265_at | 1000 | 181 | 1401 | ACATCTGCTAGAACCTTTTGCCTTA | Antisense | 5405 |
| 227265_at | 885 | 449 | 1414 | CCTTTTGCCTTAACTATTCACCAAT | Antisense | 5406 |
| 227265_at | 319 | 13 | 1480 | ATTAGAATCTTGTCTTGGTTCCATT | Antisense | 5407 |
| 227265_at | 779 | 665 | 1507 | GATGGCTAATATTTGTTATCTTAAT | Antisense | 5408 |
| 227265_at | 325 | 19 | 1539 | ATTTCTGAGGTCATGATTACTTGAA | Antisense | 5409 |
| 227265_at | 864 | 1 | 1565 | ATATTGACTAAAACTGGGTCCTTAG | Antisense | 5410 |
| 227265_at | 290 | 805 | 1580 | GGGTCCTTAGAAATTCCAGGTGGAG | Antisense | 5411 |
| 227265_at | 128 | 789 | 1599 | GTGGAGCTGATTTACCTATGACTGA | Antisense | 5412 |
| 227265_at | 512 | 289 | 1671 | AATTAATGACACATCTGTTCAATAA | Antisense | 5413 |
| 227265_at | 1066 | 739 | 1802 | GTAATGTCATCACAATAAGCTCTTG | Antisense | 5414 |
| 227265_at | 778 | 277 | 1852 | AATTAGGTTTATGTTTCATGTCTTT | Antisense | 5415 |
| 227346_at | 745 | 961 | 407 | TGCTTTTGGTGCGATGGCACTCACT | Antisense | 5416 |
| 227346_at | 845 | 547 | 460 | GCAATATTGTTTCCAATACTTTCTA | Antisense | 5417 |
| 227346_at | 374 | 783 | 507 | GTGTGGTGATTGTTCAGGTCGAATC | Antisense | 5418 |
| 227346_at | 83 | 85 | 522 | AGGTCGAATCTGTTGTATCCAGTAC | Antisense | 5419 |
| 227346_at | 359 | 51 | 538 | ATCCAGTACAGCTTTAGGTCTTCAG | Antisense | 5420 |
| 227346_at | 120 | 393 | 563 | CTGCCCTTCTGGCGAGTACATGCAC | Antisense | 5421 |
| 227346_at | 211 | 959 | 606 | TGCAGTCATATTTCCAGTCTGCCTC | Antisense | 5422 |
| 227346_at | 628 | 977 | 618 | TCCAGTCTGCCTCTATGATGATGTT | Antisense | 5423 |
| 227346_at | 207 | 583 | 664 | GAACAAGGGATGTACCACTGGAGGA | Antisense | 5424 |
| 227346_at | 682 | 647 | 692 | GAGTATCCTTTTGTACACATTTTGA | Antisense | 5425 |
| 227346_at | 65 | 277 | 717 | AATGCTTCTTCTGTAGTGATAGAAC | Antisense | 5426 |
| 227361_at | 28 | 1139 | 2610 | TTCCCAGGATTCTCTTTGGGGGTCA | Antisense | 5427 |
| 227361_at | 712 | 587 | 2668 | GAAACAGTTTCAGATCCTGCCAGGA | Antisense | 5428 |
| 227361_at | 1026 | 333 | 2738 | CAGTACGTATCTAAGATGCTGACAC | Antisense | 5429 |
| 227361_at | 489 | 509 | 2767 | GCTAATGTGACTTTTCAGCTTATCA | Antisense | 5430 |
| 227361_at | 800 | 207 | 2813 | AAAGGTGTGGTTAGATGTTTTCTCA | Antisense | 5431 |
| 227361_at | 890 | 353 | 2847 | CATTAATTTATCACTGAGTCTCATT | Antisense | 5432 |
| 227361_at | 147 | 651 | 2862 | GAGTCTCATTCAACCAAGTAATCTA | Antisense | 5433 |
| 227361_at | 389 | 541 | 2896 | GCAAATTCTAGCAGTATGTCTTCGA | Antisense | 5434 |
| 227361_at | 945 | 725 | 2909 | GTATGTCTTCGATAACTTGGATGTT | Antisense | 5435 |
| 227361_at | 1082 | 101 | 2966 | AGTATTTTGTCCTATGTATAACACA | Antisense | 5436 |
| 227361_at | 488 | 289 | 3031 | AATTCTGGTAATTCATACTATTTCT | Antisense | 5437 |
| 227550_at | 1032 | 931 | 1697 | TGTTGCATTTTTCACTCTTAACCCG | Antisense | 5438 |
| 227550_at | 1042 | 781 | 1725 | GTGTGTTTCAGCTTATGTTCGTTCT | Antisense | 5439 |
| 227550_at | 827 | 557 | 1781 | GAAGGCGGCTTCTGATTTTTAGGGT | Antisense | 5440 |
| 227550_at | 574 | 939 | 1828 | TGAGGGGTTCAGACACCCAGTCTCC | Antisense | 5441 |
| 227550_at | 1125 | 909 | 1865 | TGAGGGGTCGACTGAGCTTTGTTGA | Antisense | 5442 |
| 227550_at | 992 | 493 | 1912 | GCGGGTCTCCATGTTATATTGTGTG | Antisense | 5443 |
| 227550_at | 785 | 1157 | 1930 | TTGTGTGTTTACTGAGCTTCCCACT | Antisense | 5444 |
| 227550_at | 666 | 671 | 1962 | GATGACACATTTGTCCATCGTCCTG | Antisense | 5445 |
| 227550_at | 403 | 1001 | 1991 | TCTGCTTTCCAGAGGACACCGGAGC | Antisense | 5446 |
| 227550_at | 1158 | 503 | 2041 | GCTGCCTCACATAGCTGTTTTGCAA | Antisense | 5447 |
| 227550_at | 145 | 129 | 2189 | AGAATGTACATAGTCCCTTTGGCCA | Antisense | 5448 |
| 228017_s_at | 378 | 479 | 799 | GCCTGCGTAAGTGAGGAAACAGCTG | Antisense | 5449 |
| 228017_s_at | 374 | 939 | 810 | TGAGGAAACAGCTGATCCTGCTCCT | Antisense | 5450 |
| 228017_s_at | 441 | 377 | 847 | CTCAGCGACCGACCAGTGACAATGA | Antisense | 5451 |
| 228017_s_at | 979 | 151 | 858 | ACCAGTGACAATGACAGGAGCTCCC | Antisense | 5452 |
| 228017_s_at | 337 | 769 | 862 | GTGACAATGACAGGAGCTCCCAGGC | Antisense | 5453 |
| 228017_s_at | 1106 | 383 | 933 | CTGCCCTGGGTTCTAAGTACTGGAC | Antisense | 5454 |
| 228017_s_at | 317 | 487 | 935 | GCCCTGGGTTCTAAGTACTGGACAC | Antisense | 5455 |
| 228017_s_at | 154 | 807 | 940 | GGGTTCTAAGTACTGGACACCAGCC | Antisense | 5456 |
| 228017_s_at | 48 | 317 | 983 | CACGGCTGGCTGCAGCGTCAAGAGA | Antisense | 5457 |
| 228017_s_at | 987 | 495 | 987 | GCTGGCTGCAGCGTCAAGAGAGTTT | Antisense | 5458 |
| 228017_s_at | 1105 | 501 | 991 | GCTGCAGCGTCAAGAGAGTTTGTAA | Antisense | 5459 |
| 228071_at | 1072 | 79 | 679 | AGGAGTTGGTGGAGCTGATAGAGAA | Antisense | 5460 |
| 228071_at | 259 | 821 | 707 | GGTGCAGTGCAACGAAGGGGCTTAC | Antisense | 5461 |
| 228071_at | 2 | 951 | 714 | TGCAACGAAGGGGCTTACTTTTCTG | Antisense | 5462 |
| 228071_at | 410 | 1137 | 734 | TTCTGATGACATATACAAGGACACA | Antisense | 5463 |
| 228071_at | 563 | 661 | 791 | GAGGAAAATCTACACTGACCAATTA | Antisense | 5464 |
| 228071_at | 447 | 27 | 964 | ATAGGATTTGGAAGATGCTTTCAGA | Antisense | 5465 |
| 228071_at | 15 | 597 | 987 | GAAATATGGCATAGGTTTTTGTCGA | Antisense | 5466 |
| 228071_at | 260 | 877 | 994 | GGCATAGGTTTTTGTCGAAATGTAA | Antisense | 5467 |
| 228071_at | 651 | 1107 | 1020 | TTTTATTCTTCCTAATTTACTGTGA | Antisense | 5468 |
| 228071_at | 603 | 1013 | 1026 | TCTTCCTAATTTACTGTGATTTGTT | Antisense | 5469 |
| 228071_at | 599 | 681 | 1075 | GATAGTTAGAGAAATACCTCCTTCC | Antisense | 5470 |
| 228094_at | 149 | 803 | 193 | GGGAGAAACACATTTACTCCCCAAT | Antisense | 5471 |
| 228094_at | 1102 | 373 | 272 | CTACATGACCATGCACCCAGTTTGG | Antisense | 5472 |
| 228094_at | 156 | 85 | 306 | AGGTCAGATCGGAACAACTCACTTG | Antisense | 5473 |
| 228094_at | 371 | 559 | 381 | GAATGGAGAGTCCCTTCATCTCAGC | Antisense | 5474 |
| 228094_at | 758 | 1023 | 401 | TCAGCAGCGGTGGAGACTCTCTCCT | Antisense | 5475 |
| 228094_at | 352 | 381 | 443 | CTCTACCAGTGATTTCAGACTCCCG | Antisense | 5476 |
| 228094_at | 1 | 667 | 514 | GATGGAGAATTTGGAGCCTGGCAGA | Antisense | 5477 |
| 228094_at | 364 | 109 | 538 | AGAGACTGGACAGCTCTGGAGGAAC | Antisense | 5478 |
| 228094_at | 295 | 997 | 552 | TCTGGAGGAACAGGCCTGCTGAGGG | Antisense | 5479 |
| 228094_at | 144 | 891 | 594 | GGCCTCTGGAGTGGGACACTGGCCC | Antisense | 5480 |
| 228094_at | 640 | 439 | 671 | CCTGTGGGCAGGGTTCTTAGTGGAT | Antisense | 5481 |
| 228786_at | 359 | 309 | 317 | CACACGCAGATCCTGCACTGTACTG | Antisense | 5482 |
| 228786_at | 819 | 49 | 326 | ATCCTGCACTGTACTGTCCAGTCAA | Antisense | 5483 |
| 228786_at | 1007 | 165 | 338 | ACTGTCCAGTCAACTGACTTCAGCA | Antisense | 5484 |
| 228786_at | 645 | 665 | 365 | GATGTCTGGGTTCAGCAGCGAGTTG | Antisense | 5485 |
| 228786_at | 1099 | 645 | 384 | GAGTTGCTGTGTGAGGCCACCAGAA | Antisense | 5486 |
| 228786_at | 198 | 803 | 494 | GGGAGACATTCAGAATCGAGGCGAA | Antisense | 5487 |
| 228786_at | 807 | 447 | 524 | CCTCAGTGCTCCTCTTGGAGGCAGA | Antisense | 5488 |
| 228786_at | 699 | 767 | 583 | GTGAATGTGGAAGACCAGCAGATTG | Antisense | 5489 |
| 228786_at | 1088 | 785 | 665 | GTGGTGAAGTGGCCCTGCACAAAAC | Antisense | 5490 |
| 228786_at | 679 | 263 | 671 | AAGTGGCCCTGCACAAAACGTTGCT | Antisense | 5491 |
| 228786_at | 332 | 1071 | 817 | TAGTAAAGCTAAGTTTTATCTCTTC | Antisense | 5492 |
| 228812_at | 843 | 637 | 765 | GAGACTTCATTGGTGATACACTCAA | Antisense | 5493 |
| 228812_at | 406 | 775 | 777 | GTGATACACTCAATTTTTACTGGGT | Antisense | 5494 |
| 228812_at | 488 | 509 | 807 | GCTAATAATGTTGGTCACTGTCTCA | Antisense | 5495 |
| 228812_at | 742 | 301 | 869 | CACAAAGCTTTTGGGTAACCAGCGT | Antisense | 5496 |
| 228812_at | 873 | 805 | 881 | GGGTAACCAGCGTTCTTAAATGTAT | Antisense | 5497 |
| 228812_at | 552 | 1075 | 903 | TATGGTTTTTGACCAGGTGAACCCT | Antisense | 5498 |
| 228812_at | 775 | 623 | 913 | GACCAGGTGAACCCTTTAGAAGTGA | Antisense | 5499 |
| 228812_at | 1155 | 199 | 963 | AAATACCTTTGGCTGTGATGAATGT | Antisense | 5500 |
| 228812_at | 1101 | 953 | 981 | TGAATGTAGATCCCAGCAGAATACC | Antisense | 5501 |
| 228812_at | 137 | 1153 | 1021 | TTGACTGAGTATTTGTAGATGCTTA | Antisense | 5502 |
| 228812_at | 198 | 259 | 1091 | AAGTTCTCAGGTACTGTTCAATTAT | Antisense | 5503 |
| 229152_at | 192 | 953 | 20 | TGAAGAAAGTTCTCCTCCTGATCAC | Antisense | 5504 |
| 229152_at | 858 | 387 | 34 | CTCCTGATCACAGCCATCTTGGCAG | Antisense | 5505 |
| 229152_at | 299 | 455 | 47 | CCATCTTGGCAGTGGCTGTTGGTTT | Antisense | 5506 |
| 229152_at | 343 | 603 | 115 | GACAGCGATGAATTAGCTTCAGGGT | Antisense | 5507 |
| 229152_at | 793 | 975 | 177 | TCCACCAATTCCATTTCCAAGATTT | Antisense | 5508 |
| 229152_at | 136 | 257 | 195 | AAGATTTCCATGGTTTAGACGTAAT | Antisense | 5509 |
| 229152_at | 502 | 1067 | 210 | TAGACGTAATTTTCCTATTCCAATA | Antisense | 5510 |
| 229152_at | 194 | 369 | 224 | CTATTCCAATACCTGAATCTGCCCC | Antisense | 5511 |
| 229152_at | 124 | 209 | 287 | AAAGTCACGATAAACCTGGTCACCT | Antisense | 5512 |
| 229152_at | 1068 | 199 | 382 | AAATAGCACACAGCATTCTCTAGTC | Antisense | 5513 |
| 229152_at | 142 | 25 | 408 | ATATCTTTAGTGATCTTCTTTAATA | Antisense | 5514 |
| 229598_at | 248 | 15 | 566 | ATTTTTCTTAGCTAAATCTGGCAAC | Antisense | 5515 |
| 229598_at | 573 | 133 | 636 | AGCAGAATCTGCCATATGAGTAATA | Antisense | 5516 |
| 229598_at | 259 | 649 | 653 | GAGTAATAGAAGTGAGCAGGCCCAG | Antisense | 5517 |
| 229598_at | 304 | 335 | 675 | CAGGACTCCCTAAGTCAAGAAACCA | Antisense | 5518 |
| 229598_at | 19 | 121 | 692 | AGAAACCAAGAGGCGTCATTACGGA | Antisense | 5519 |
| 229598_at | 549 | 209 | 717 | AAAGAGTAACTCACCCTGTGTGCTC | Antisense | 5520 |
| 229598_at | 90 | 143 | 759 | AGCGATGCCCCCATGTTATGAATGG | Antisense | 5521 |
| 229598_at | 747 | 859 | 784 | GGAAAAGTTCACTGAAGGGTTCATA | Antisense | 5522 |
| 229598_at | 796 | 1161 | 846 | TTGGATACCTTCAAGGGATCAGAAA | Antisense | 5523 |
| 229598_at | 394 | 1017 | 899 | TCATCATTACTCTCTACATTATTAT | Antisense | 5524 |
| 229598_at | 448 | 1109 | 983 | TTTTAACTTGTCTGCATGTTTGAAA | Antisense | 5525 |
| 231229_at | 843 | 533 | 31 | GCACGTCCAAGGTGATCCTGAGGGC | Antisense | 5526 |
| 231229_at | 969 | 317 | 96 | CACCCTGAAGAAGGCTGTTTCCACC | Antisense | 5527 |
| 231229_at | 999 | 605 | 130 | GACATGGCCCGAAATGCCTATCACT | Antisense | 5528 |
| 231229_at | 632 | 477 | 145 | GCCTATCACTTCAAGCGTGTGCTCA | Antisense | 5529 |
| 231229_at | 105 | 389 | 247 | CTCCAAGTCCAAGCTCAAGGTCAAG | Antisense | 5530 |
| 231229_at | 658 | 603 | 315 | GACAGCACAGGTCACTACTGGGCTC | Antisense | 5531 |
| 231229_at | 453 | 1057 | 330 | TACTGGGCTCCAAACAGGGGCACAA | Antisense | 5532 |
| 231229_at | 908 | 293 | 352 | CAAGCGGCTTATCAAGGGGGTTCGA | Antisense | 5533 |
| 231229_at | 961 | 803 | 369 | GGGTTCGAAGGGTGGCCAAGTGCCA | Antisense | 5534 |
| 231229_at | 847 | 59 | 403 | ATGAGGCAGGCCAGGCAAGCAGTCA | Antisense | 5535 |
| 231229_at | 1130 | 419 | 441 | CGCCATTGGCTCAGTGCAGTGGGAA | Antisense | 5536 |
| 231929_at | 1064 | 879 | 2289 | GGCTCAAATACCATACCTCAGAAAA | Antisense | 5537 |
| 231929_at | 779 | 587 | 2336 | GAAACAGTCTTTGCAGCTGTGTGAC | Antisense | 5538 |
| 231929_at | 711 | 533 | 2348 | GCAGCTGTGTGACAAGTCACTCTAC | Antisense | 5539 |
| 231929_at | 1117 | 195 | 2359 | ACAAGTCACTCTACTACATACTGAT | Antisense | 5540 |
| 231929_at | 1014 | 165 | 2378 | ACTGATTTGGAGACCTCCGCTAAAT | Antisense | 5541 |
| 231929_at | 912 | 621 | 2389 | GACCTCCGCTAAATAGTTTTATCAC | Antisense | 5542 |
| 231929_at | 855 | 167 | 2412 | ACTGCAGACTAAAATGTGGGACTTG | Antisense | 5543 |
| 231929_at | 472 | 205 | 2606 | AAAGGTTTGTACTGTCTGAGTGCAC | Antisense | 5544 |
| 231929_at | 986 | 753 | 2619 | GTCTGAGTGCACAGCTACTGGAATA | Antisense | 5545 |
| 231929_at | 1101 | 1117 | 2647 | TTAGGGAATCTCAGGAACAAGCATA | Antisense | 5546 |
| 231929_at | 63 | 741 | 2705 | GTAAGTGCAGTTTTTAATTCTGTAT | Antisense | 5547 |
| 232311_at | 229 | 181 | 2003 | ACATACCTTGGGTTGATCCACTTAG | Antisense | 5548 |
| 232311_at | 757 | 675 | 2017 | GATCCACTTAGGAACCTCAGATAAT | Antisense | 5549 |
| 232311_at | 930 | 231 | 2042 | AACATCTGCCACGTATAGAGCAATT | Antisense | 5550 |
| 232311_at | 444 | 1071 | 2069 | TATGTCCCAGGCACTCTACTAGACA | Antisense | 5551 |
| 232311_at | 999 | 371 | 2084 | CTACTAGACACTTCATACAGTTTAG | Antisense | 5552 |
| 232311_at | 33 | 811 | 2119 | GGGTGTAGATCAAGGCAGGAGCAGG | Antisense | 5553 |
| 232311_at | 387 | 667 | 2220 | GATGGGGGCTATTATGAACTGAGAA | Antisense | 5554 |
| 232311_at | 683 | 1159 | 2264 | TTGGGGCCAAATCATGTAGACTCTT | Antisense | 5555 |
| 232311_at | 543 | 1067 | 2280 | TAGACTCTTGAGTGATGTGTTAAGG | Antisense | 5556 |
| 232311_at | 137 | 869 | 2303 | GGAATGCTATGAGTGCTGAGAGGGC | Antisense | 5557 |
| 232311_at | 1085 | 521 | 2326 | GCATCAGAAGTCCTTGAGAGCCTCC | Antisense | 5558 |
| 232843_s_at | 48 | 299 | 4483 | CAAGCTAAAAGAGAACCTCAGGCCA | Antisense | 5559 |
| 232843_s_at | 143 | 575 | 4495 | GAACCTCAGGCCAATGATCGAGCGG | Antisense | 5560 |
| 232843_s_at | 211 | 891 | 4503 | GGCCAATGATCGAGCGGAAAATTCC | Antisense | 5561 |
| 232843_s_at | 944 | 859 | 4518 | GGAAAATTCCAGAACTGTACAAGCC | Antisense | 5562 |
| 232843_s_at | 31 | 737 | 4534 | GTACAAGCCAATATTCAGAGTTGAG | Antisense | 5563 |
| 232843_s_at | 479 | 125 | 4568 | AGAACATTGTGCTGTCTGTCAGCAT | Antisense | 5564 |
| 232843_s_at | 265 | 499 | 4578 | GCTGTCTGTCAGCATATGTATATCA | Antisense | 5565 |
| 232843_s_at | 683 | 745 | 4585 | GTCAGCATATGTATATCAGCTACAA | Antisense | 5566 |
| 232843_s_at | 658 | 23 | 4611 | ATATATTCAACTTTGACTTCTTTTG | Antisense | 5567 |
| 232843_s_at | 920 | 1125 | 4696 | TTAATATGACTGTGACCTTGACTGA | Antisense | 5568 |
| 232843_s_at | 86 | 1079 | 4700 | TATGACTGTGACCTTGACTGATAAT | Antisense | 5569 |
| 235276_at | 927 | 159 | 169 | ACCCTGCACTCCCAAAGATTTTGTG | Antisense | 5570 |
| 235276_at | 224 | 105 | 184 | AGATTTTGTGCAGATGGGTAGTTCC | Antisense | 5571 |
| 235276_at | 950 | 769 | 241 | GTGACTTACTTCATGACCAGAACTA | Antisense | 5572 |
| 235276_at | 28 | 809 | 281 | GGGGTATAAACATCTTGCTTAACCA | Antisense | 5573 |
| 235276_at | 646 | 121 | 343 | AGACTTGCTGCCTAAAGGAGCCCAC | Antisense | 5574 |
| 235276_at | 925 | 969 | 351 | TGCCTAAAGGAGCCCACCATTTTAC | Antisense | 5575 |
| 235276_at | 932 | 175 | 374 | ACTTTTCACATTTAATCTGCCACGT | Antisense | 5576 |
| 235276_at | 513 | 1125 | 385 | TTAATCTGCCACGTTGAATCAATTG | Antisense | 5577 |
| 235276_at | 1070 | 213 | 415 | AAACCTGACTCGCAGGTGACTGGAC | Antisense | 5578 |
| 235276_at | 134 | 815 | 429 | GGTGACTGGACAGGAAATCCCAAAG | Antisense | 5579 |
| 235276_at | 675 | 305 | 449 | CAAAGTTCCACCATTTCTATGCTTA | Antisense | 5580 |
| 235391_at | 477 | 17 | 281 | ATTTCACGGCAAAGCTTTAGAGGTC | Antisense | 5581 |
| 235391_at | 482 | 1101 | 296 | TTTAGAGGTCTACACTGCTGCCTAC | Antisense | 5582 |
| 235391_at | 458 | 1051 | 306 | TACACTGCTGCCTACCAGAATATAC | Antisense | 5583 |
| 235391_at | 862 | 289 | 369 | AATTCTCTGTATGCACCAGATTATT | Antisense | 5584 |
| 235391_at | 758 | 541 | 417 | GCAAATTCAAAGTCACCTCTTCAGA | Antisense | 5585 |
| 235391_at | 16 | 155 | 431 | ACCTCTTCAGAGATCACTGTCAGCT | Antisense | 5586 |
| 235391_at | 439 | 167 | 446 | ACTGTCAGCTAAGTGTGTATCTGGA | Antisense | 5587 |
| 235391_at | 569 | 185 | 476 | ACAGGTATCCACTTGTCGACTAAGA | Antisense | 5588 |
| 235391_at | 29 | 1123 | 565 | TTAAGTAAACTACACATTTCCATTT | Antisense | 5589 |
| 235391_at | 985 | 579 | 630 | GAACTTTATACTCACTTTGCTATGT | Antisense | 5590 |
| 235391_at | 369 | 245 | 656 | AAGCCTCAAAGTGAAGTCCAACTGG | Antisense | 5591 |
| 235421_at | 755 | 29 | 109 | ATACCTTCACAATCTGAACTTTCTC | Antisense | 5592 |
| 235421_at | 770 | 579 | 124 | GAACTTTCTCTAGATGGGCACAGAT | Antisense | 5593 |
| 235421_at | 627 | 95 | 201 | AGTGCTGAGGCTTTTTGCAGGCGCA | Antisense | 5594 |
| 235421_at | 682 | 957 | 216 | TGCAGGCGCAGTTAGCAGGCGAACT | Antisense | 5595 |
| 235421_at | 1114 | 883 | 233 | GGCGAACTGGTCAGCAGGGTTTCTG | Antisense | 5596 |
| 235421_at | 1015 | 409 | 263 | CGTAGATTTGCGTGACAGGGGCCCT | Antisense | 5597 |
| 235421_at | 1142 | 337 | 278 | CAGGGGCCCTGTGTTGCTAAGGAAT | Antisense | 5598 |
| 235421_at | 900 | 223 | 319 | AAAAGTCTCAGCGTCAGACACTCCT | Antisense | 5599 |
| 235421_at | 849 | 449 | 376 | CCTTTCCAGGCAACTCACAGTTTAG | Antisense | 5600 |
| 235421_at | 331 | 697 | 408 | GTTGTGTGTGTTCAAGCTCTTGGGT | Antisense | 5601 |
| 235421_at | 1103 | 231 | 477 | AACATCTTGTCTTACAGCTCTTTTA | Antisense | 5602 |
| 235688_s_at | 55 | 939 | 27 | TGAGGCAGTGCATGTTCTTGGCCCA | Antisense | 5603 |
| 235688_s_at | 722 | 895 | 45 | TGGCCCAGAGTAAGTGCTTAGTGAA | Antisense | 5604 |
| 235688_s_at | 52 | 91 | 64 | AGTGAATGCTTTCTAACTCCGAACC | Antisense | 5605 |
| 235688_s_at | 1104 | 809 | 108 | GGGTGTTGAGCAAAAGGGGCCTTCA | Antisense | 5606 |
| 235688_s_at | 1084 | 813 | 123 | GGGGCCTTCAAGATGTTCAAGGCAC | Antisense | 5607 |
| 235688_s_at | 178 | 891 | 186 | GGCCTCAGTGGGTGCATGTGATTAT | Antisense | 5608 |
| 235688_s_at | 45 | 935 | 204 | TGATTATCCACGTTTCACCTATGAA | Antisense | 5609 |
| 235688_s_at | 773 | 601 | 276 | GACAGGGCCTCGATTCTGTTTTAAA | Antisense | 5610 |
| 235688_s_at | 678 | 739 | 290 | TCTGTTTTAAACTCCAGTAGTCCCT | Antisense | 5611 |
| 235688_s_at | 1024 | 443 | 396 | CCTCCATTACCGTCACTGGTGAAAT | Antisense | 5612 |
| 235688_s_at | 1100 | 165 | 410 | ACTGGTGAAATGCGGCTCACCTCCC | Antisense | 5613 |
| 236203_at | 84 | 63 | 21 | ATGTCAGGTTTGTACCTACCACATT | Antisense | 5614 |
| 236203_at | 116 | 873 | 107 | GGCACATAGTAAGTAGTCGATAGGT | Antisense | 5615 |
| 236203_at | 194 | 3 | 148 | ATTGTTATTTTCTGGAGTCCAACTA | Antisense | 5616 |
| 236203_at | 963 | 647 | 162 | GAGTCCAACTAACAAATCCCACAGT | Antisense | 5617 |
| 236203_at | 211 | 203 | 175 | AAATCCCACAGTGAATGACATCACA | Antisense | 5618 |
| 236203_at | 87 | 803 | 200 | GGGATGCAACCAACAAGATCCAGAA | Antisense | 5619 |
| 236203_at | 252 | 177 | 232 | ACTTCTACTAGATAAACAACTCCAT | Antisense | 5620 |
| 236203_at | 12 | 683 | 242 | GATAAACAACTCCATTTCTTCAGCA | Antisense | 5621 |
| 236203_at | 472 | 573 | 326 | GAACCAAATTTGTATGAGGCAATCA | Antisense | 5622 |
| 236203_at | 990 | 221 | 353 | AAAACTGACACCGACTGTATTAAGG | Antisense | 5623 |
| 236203_at | 919 | 59 | 401 | ATGAGATTGCTGTTATGTTTTCTAA | Antisense | 5624 |
| 236627_at | 256 | 235 | 92 | AACTAGATTTTTGACCCTCACTCAT | Antisense | 5625 |
| 236627_at | 901 | 367 | 121 | CTTTCCTTGCTATAGACATGCTTTG | Antisense | 5626 |
| 236627_at | 995 | 119 | 134 | AGACATGCTTTGCATACCCAGCTTC | Antisense | 5627 |
| 236627_at | 1111 | 1133 | 156 | TTCTAGCCACATCTTCCCTAAGAAA | Antisense | 5628 |
| 236627_at | 190 | 839 | 230 | GGATCTGCATGTTGTCAGCTACCTA | Antisense | 5629 |
| 236627_at | 326 | 697 | 240 | GTTGTCAGCTACCTAAAGCAGCAAA | Antisense | 5630 |
| 236627_at | 400 | 1045 | 281 | TAAAATCAGGGAACCTTGCAGTTTA | Antisense | 5631 |
| 236627_at | 701 | 243 | 292 | AACCTTGCAGTTTAAGGCACACCTT | Antisense | 5632 |
| 236627_at | 1156 | 1101 | 329 | TTTAATCCTTCAATGCATCCAGCCA | Antisense | 5633 |
| 236627_at | 1062 | 979 | 334 | TCCTTCAATGCATCCAGCCAAAACA | Antisense | 5634 |
| 236627_at | 149 | 1063 | 375 | TACCATCCATCAATGCAAGGTTTTT | Antisense | 5635 |
| 236681_at | 179 | 589 | 250 | GAAACTCATGTGTCCTCATGGATCG | Antisense | 5636 |
| 236681_at | 133 | 343 | 266 | CATGGATCGTGGATGCCTTCATTTC | Antisense | 5637 |
| 236681_at | 1146 | 1021 | 326 | TCAGTAGAGTGACCCGCGGATGGCA | Antisense | 5638 |
| 236681_at | 447 | 69 | 345 | ATGGCATAAATGCACCTCCTTTTCT | Antisense | 5639 |
| 236681_at | 729 | 1015 | 367 | TCTTGGCCTTGGATCTATGGGTCTG | Antisense | 5640 |
| 236681_at | 409 | 835 | 392 | GGATTGTGGTCATCTCCTCAATCCT | Antisense | 5641 |
| 236681_at | 882 | 501 | 426 | GCTGAATCAATGTGGCCGTGGGTGG | Antisense | 5642 |
| 236681_at | 121 | 889 | 439 | GGCCGTGGGTGGGAACTTACATACA | Antisense | 5643 |
| 236681_at | 896 | 613 | 482 | GACTGTCTAAACAAGGGGGCCTCGC | Antisense | 5644 |
| 236681_at | 1013 | 789 | 498 | GGGCCTCGCATGGAGCTGTAAAGCA | Antisense | 5645 |
| 236681_at | 522 | 805 | 669 | GGGATACATGGGCAGTGCTTCAGAC | Antisense | 5646 |
| 238834_at | 67 | 641 | 19 | GAGAGAATCCTGCATCTAACAATTT | Antisense | 5647 |
| 238834_at | 550 | 1079 | 59 | TATGCTGTTATTCCTTACCTAGAGA | Antisense | 5648 |
| 238834_at | 701 | 1067 | 78 | TAGAGAAACAATTTCCCTCCAAAGT | Antisense | 5649 |
| 238834_at | 673 | 1125 | 107 | TTGAGGGGTCTGTTTAGGCCAGGCC | Antisense | 5650 |
| 238834_at | 460 | 71 | 122 | AGGCCAGGCCAACACAAGTGACCTA | Antisense | 5651 |
| 238834_at | 467 | 1095 | 220 | TTTGCTGGTGTGTACTTAGCTCAGA | Antisense | 5652 |
| 238834_at | 525 | 697 | 262 | GTTGGGTCAACTATTTCTAATGGGA | Antisense | 5653 |
| 238834_at | 95 | 801 | 283 | GGGACTTTTCCATTTGCATGTACAG | Antisense | 5654 |
| 238834_at | 189 | 99 | 306 | AGTCACTGGAAACTGCTGGGCAGAG | Antisense | 5655 |
| 238834_at | 798 | 189 | 354 | ACACTTTTTCCACCTGTCAGATTGG | Antisense | 5656 |
| 238834_at | 672 | 909 | 398 | TGGGGAAAATGGCATTCTCCCACTT | Antisense | 5657 |
| 241671_x_at | 579 | 1 | 28 | ATTCTGAAGCCAGACCGTCTTTCCT | Antisense | 5658 |
| 241671_x_at | 716 | 993 | 223 | TCGCAGCTGGGCGAGGGGACTTGGA | Antisense | 5659 |
| 241671_x_at | 861 | 403 | 229 | CTGGGCGAGGGGACTTGGAGGACAG | Antisense | 5660 |
| 241671_x_at | 555 | 813 | 237 | GGGGACTTGGAGGACAGGGTGAAGC | Antisense | 5661 |
| 241671_x_at | 958 | 177 | 241 | ACTTGGAGGACAGGGTGAAGCTGCA | Antisense | 5662 |
| 241671_x_at | 834 | 951 | 256 | TGAAGCTGCAGAAGACCTGGGGTGG | Antisense | 5663 |
| 241671_x_at | 1116 | 501 | 260 | GCTGCAGAAGACCTGGGGTGGGATG | Antisense | 5664 |
| 241671_x_at | 425 | 1067 | 287 | TAGAGAGGACGCCAAGGACTGGGGA | Antisense | 5665 |
| 241671_x_at | 19 | 113 | 290 | AGAGGACGCCAAGGACTGGGGAAGG | Antisense | 5666 |
| 241671_x_at | 516 | 865 | 315 | GGAAGTTAGGAATACCTTACATCCA | Antisense | 5667 |
| 241671_x_at | 536 | 75 | 322 | AGGAATACCTTACATCCAATGCCCA | Antisense | 5668 |
| 243010_at | 200 | 597 | 608 | GAAATACACCCACTCTCTTGGAATA | Antisense | 5669 |
| 243010_at | 1151 | 57 | 633 | ATGACGTACCACTCAGTTGGACCCT | Antisense | 5670 |
| 243010_at | 856 | 619 | 652 | GACCCTCAAGAGTCACTGCTTTGTC | Antisense | 5671 |
| 243010_at | 506 | 417 | 704 | CGCACGCTTCCATTTGATGCATTTG | Antisense | 5672 |
| 243010_at | 1129 | 63 | 753 | ATGTCATTGTCCTTGAGACCCTACA | Antisense | 5673 |
| 243010_at | 296 | 639 | 767 | GAGACCCTACATGTGCAGTTTGGCT | Antisense | 5674 |
| 243010_at | 825 | 1097 | 840 | TTTCCTGCAGGCTTTTCCATGAGTA | Antisense | 5675 |
| 243010_at | 970 | 579 | 879 | GAACAAATCTGTATGGCTTTTCCCC | Antisense | 5676 |
| 243010_at | 483 | 767 | 943 | GTGAACTTGTCCTAGTATGCTTGCC | Antisense | 5677 |
| 243010_at | 1033 | 357 | 962 | CTTGCCTCACAAACGTTTTAGCCAT | Antisense | 5678 |
| 243010_at | 136 | 365 | 1119 | CTTAGCCTGACAGTGTCCTGTTCTC | Antisense | 5679 |
| 244061_at | 165 | 595 | 45 | GAAATGGCACATTTTCTGGATGTGA | Antisense | 5680 |
| 244061_at | 750 | 729 | 140 | GTACTTACCCTCATAAGCATTAAAA | Antisense | 5681 |
| 244061_at | 603 | 597 | 178 | GAAATTCCATAGAAATGTGCCTATC | Antisense | 5682 |
| 244061_at | 238 | 763 | 194 | GTGCCTATCATGTTATACTGACTCA | Antisense | 5683 |
| 244061_at | 337 | 305 | 217 | CAAACCAGAAGACCTAGAGTATGAT | Antisense | 5684 |
| 244061_at | 82 | 783 | 260 | GTGGTGGGTATGAGTGGAAGTATGT | Antisense | 5685 |
| 244061_at | 152 | 783 | 283 | GTGTGTGAGATTTATCATTGCCATA | Antisense | 5686 |
| 244061_at | 346 | 645 | 289 | GAGATTTATCATTGCCATAGTGTAA | Antisense | 5687 |
| 244061_at | 554 | 737 | 310 | GTAAAAGAGTTGAATTAGCTTCCAC | Antisense | 5688 |
| 244061_at | 103 | 13 | 323 | ATTAGCTTCCACTTGACTAGATGAG | Antisense | 5689 |
| 244061_at | 192 | 1069 | 340 | TAGATGAGAGCTCTTAGTTCTTATT | Antisense | 5690 |
| 244393_x_at | 880 | 421 | 132 | CCCAGCCGCTATAACTTTTAACAAT | Antisense | 5691 |
| 244393_x_at | 314 | 197 | 152 | ACAATTCCCATATGTCCTTTATTCC | Antisense | 5692 |
| 244393_x_at | 700 | 1077 | 162 | TATGTCCTTTATTCCACTAAGATGA | Antisense | 5693 |
| 244393_x_at | 464 | 59 | 183 | ATGAGTGCAGTATATATTTCCATCT | Antisense | 5694 |
| 244393_x_at | 489 | 23 | 196 | ATATTTCCATCTGTCCAAGGCTTCC | Antisense | 5695 |
| 244393_x_at | 796 | 795 | 270 | GGGCATTTGGGGAATCCAGGCTGTG | Antisense | 5696 |
| 244393_x_at | 1140 | 455 | 285 | CCAGGCTGTGATTCAGGGAAGTTCC | Antisense | 5697 |
| 244393_x_at | 597 | 257 | 303 | AAGTTCCAAGTGTCTGATGAAGTGT | Antisense | 5698 |
| 244393_x_at | 722 | 1155 | 328 | TTGTTTTACATCTTTGTGTCCCTTG | Antisense | 5699 |
| 244393_x_at | 247 | 453 | 348 | CCTTGCAGGTCTAGCACTGTGCTAT | Antisense | 5700 |
| 244393_x_at | 748 | 765 | 366 | GTGCTATGTAGGTAACATGTGCTCC | Antisense | 5701 |
| 34210_at | 633 | 1033 | 46 | TAATCGGCTCACTATAGGAATTTGC | Antisense | 5702 |
| 34210_at | 264 | 249 | 103 | AAGCAGCTAAACCAAAAGAAGCCTC | Antisense | 5703 |
| 34210_at | 565 | 331 | 240 | CAGATACAAACTGGACTCTCAGGAC | Antisense | 5704 |
| 34210_at | 524 | 251 | 246 | CAAACTGGACTCTCAGGACAAAACG | Antisense | 5705 |
| 34210_at | 220 | 1021 | 258 | TCAGGACAAAACGACACCAGCCAAA | Antisense | 5706 |
| 34210_at | 394 | 1145 | 324 | TTCCTTTTCTTCGTGGCCAATGCCA | Antisense | 5707 |
| 34210_at | 371 | 1133 | 330 | TTCTTCGTGGCCAATGCCATAATCC | Antisense | 5708 |
| 34210_at | 655 | 1137 | 360 | TTCTGCTTCAGTTGAGGTGACACGT | Antisense | 5709 |
| 34210_at | 600 | 1127 | 366 | TTCAGTTGAGGTGACACGTCTCAGC | Antisense | 5710 |
| 34210_at | 921 | 769 | 376 | GTGACACGTCTCAGCCTTAGCCCTG | Antisense | 5711 |
| 34210_at | 1002 | 833 | 460 | GGTTGATGCCAGACATCACCAGGTT | Antisense | 5712 |
| 34210_at | 367 | 39 | 474 | ATCACCAGGTTGTAGAAGTTGACAG | Antisense | 5713 |
| 34210_at | 346 | 321 | 476 | CACCAGGTTGTAGAAGTTGACAGGC | Antisense | 5714 |
| 34210_at | 615 | 63 | 539 | ATGTAGGGGCCAAGCAGTGCCCAGC | Antisense | 5715 |
| 34210_at | 410 | 925 | 540 | TGTAGGGGCCAAGCAGTGCCCAGCT | Antisense | 5716 |
| 34210_at | 394 | 741 | 569 | GTCAATAAAGTTACCCTTGTACTTG | Antisense | 5717 |

TABLE 18
34PS gene list probe sequences

| | | | | | | |
|---|---|---|---|---|---|---|
| | | | Probe | | | |
| Probe Set | | | Interrogation | | Target | SEQ ID |
| Name | Probe.X | Probe.Y | Position | Probe Sequence | Strandedness | NO: |

| | | | | | | |
|---|---|---|---|---|---|---|
| 1552584_at | 846 | 165 | 1489 | ACTGTGGCCGACCTACTATTTTTAT | Antisense | 5718 |
| 1552584_at | 300 | 833 | 1527 | GGTTCTCAGTCTGTTGGCAGACTGG | Antisense | 5719 |
| 1552584_at | 242 | 97 | 1534 | AGTCTGTTGGCAGACTGGAGTGCAA | Antisense | 5720 |
| 1552584_at | 900 | 145 | 1796 | AGCCTGGTCCCATATCATAGTGAAA | Antisense | 5721 |
| 1552584_at | 667 | 351 | 1806 | CATATCATAGTGAAATGGTGCCTGT | Antisense | 5722 |
| 1552584_at | 458 | 205 | 1818 | AAATGGTGCCTGTAAAGCTCTCAGC | Antisense | 5723 |
| 1552584_at | 742 | 247 | 1832 | AAGCTCTCAGCATTGGCTTGGCACA | Antisense | 5724 |
| 1552584_at | 952 | 1161 | 1844 | TTGGCTTGGCACATGCAGTTGGTAC | Antisense | 5725 |
| 1552584_at | 153 | 873 | 1851 | GGCACATGCAGTTGGTACTCAATAA | Antisense | 5726 |
| 1552584_at | 441 | 827 | 1864 | GGTACTCAATAAACGGCTGTTGCTA | Antisense | 5727 |
| 1552584_at | 389 | 1033 | 1869 | TCAATAAACGGCTGTTGCTATCCCC | Antisense | 5728 |
| 1558972_s_at | 492 | 1125 | 3472 | TTCTAAGACCCACATTTGGTTATTG | Antisense | 5729 |
| 1558972_s_at | 889 | 1161 | 3487 | TTGGTTATTGAAGGCCACAGCGAAT | Antisense | 5730 |
| 1558972_s_at | 756 | 469 | 3506 | GCGAATCTTAACCTAACAGCCTTGA | Antisense | 5731 |
| 1558972_s_at | 10 | 323 | 3522 | CAGCCTTGACAAACTGCACCATAGG | Antisense | 5732 |
| 1558972_s_at | 1127 | 535 | 3537 | GCACCATAGGTGTTTTTAGACTCAT | Antisense | 5733 |
| 1558972_s_at | 345 | 1117 | 3639 | TTAGTAACTACCATTCTTTGATTAG | Antisense | 5734 |
| 1558972_s_at | 1154 | 555 | 3674 | GAATGCATATCTTACTTTGGTTGTA | Antisense | 5735 |
| 1558972_s_at | 1071 | 717 | 3692 | GGTTGTAAATTATCAAGGGCTTTCT | Antisense | 5736 |
| 1558972_s_at | 151 | 1029 | 3756 | TCACATACTGTGTTTCCAGTTGTCT | Antisense | 5737 |
| 1558972_s_at | 755 | 777 | 3765 | GTGTTTCCAGTTGTCTTGATATTGA | Antisense | 5738 |
| 1558972_s_at | 500 | 925 | 3794 | TGTAATAAACTTCATGCTCACCTAT | Antisense | 5739 |
| 1559584_a_at | 971 | 7 | 2313 | ATTCCTGGGCTCGAGAGAGCCACTC | Antisense | 5740 |
| 1559584_a_at | 263 | 775 | 2412 | GTGATTTTGCCATATTAGTTTACCA | Antisense | 5741 |
| 1559584_a_at | 986 | 1095 | 2417 | TTTGCCATATTAGTTTACCATCTGT | Antisense | 5742 |
| 1559584_a_at | 183 | 715 | 2429 | GTTTACCATCTGTACAATTATTTGC | Antisense | 5743 |
| 1559584_a_at | 262 | 455 | 2434 | CCATCTGTACAATTATTTGCTTTAT | Antisense | 5744 |
| 1559584_a_at | 10 | 351 | 2465 | CTTTAAATTGGCTCATTATTCACTT | Antisense | 5745 |
| 1559584_a_at | 197 | 293 | 2470 | AATTGGCTCATTATTCACTTAATGA | Antisense | 5746 |
| 1559584_a_at | 289 | 597 | 2493 | GAAATTATTGCAACAGGAATCTTTT | Antisense | 5747 |
| 1559584_a_at | 590 | 543 | 2502 | GCAACAGGAATCTTTTGTATCACTT | Antisense | 5748 |
| 1559584_a_at | 1055 | 553 | 2509 | GAATCTTTTGTATCACTTCTGTAAA | Antisense | 5749 |
| 1559584_a_at | 1061 | 751 | 2544 | GTCTCATTTGCCATCAATAGAAGGT | Antisense | 5750 |
| 1563473_at | 8 | 583 | 5590 | GAAAATTCCTGGCAGTTTCAACTGT | Antisense | 5751 |
| 1563473_at | 504 | 1067 | 5617 | TAGACATTGCTAACCTGTTCTCCAA | Antisense | 5752 |
| 1563473_at | 966 | 499 | 5646 | GCTGAACCAATTTCTGTTTCCTCAA | Antisense | 5753 |
| 1563473_at | 149 | 233 | 5757 | AACATTTCTGCATAAGGTTCTACAG | Antisense | 5754 |
| 1563473_at | 252 | 1079 | 5796 | TATGACCCTTTGGATTATGCCTACA | Antisense | 5755 |
| 1563473_at | 686 | 235 | 5843 | AACTACATTGTACCTGGCCTTAGGC | Antisense | 5756 |
| 1563473_at | 408 | 203 | 5888 | AAATGAAACCAGCTTTTGCCCTCAG | Antisense | 5757 |
| 1563473_at | 538 | 1111 | 5901 | TTTTGCCCTCAGGTTGATCCCATCT | Antisense | 5758 |
| 1563473_at | 343 | 677 | 5916 | GATCCCATCTCCTGGAGTTGGCAGA | Antisense | 5759 |
| 1563473_at | 885 | 215 | 5966 | AAACTGTATGGTTCACATTGTGCTA | Antisense | 5760 |
| 1563473_at | 251 | 31 | 6065 | ATACCGTATGCATTATGTCCCAGGG | Antisense | 5761 |
| 203915_at | 1064 | 689 | 1973 | GATTATCAATTACCACACCATCTCC | Antisense | 5762 |
| 203915_at | 1124 | 569 | 2058 | GAAGCATGATTGGTGCCCAGTTAGC | Antisense | 5763 |
| 203915_at | 634 | 423 | 2073 | CCCAGTTAGCCTCTGCAGGATGTGG | Antisense | 5764 |
| 203915_at | 836 | 725 | 2131 | GTAGGAGAGGTTGTCTGTGGCCAGA | Antisense | 5765 |
| 203915_at | 555 | 153 | 2162 | ACCTATACTCACTTTCCCAAATTGA | Antisense | 5766 |
| 203915_at | 672 | 1151 | 2183 | TTGAATCACTGCTCACACTGCTGAT | Antisense | 5767 |
| 203915_at | 1055 | 1067 | 2212 | TAGAGTGCTGTCCGGTGGAGATCCC | Antisense | 5768 |
| 203915_at | 116 | 433 | 2235 | CCACCCGAACGTCTTATCTAATCAT | Antisense | 5769 |
| 203915_at | 256 | 41 | 2255 | ATCATGAAACTCCCTAGTTCCTTCA | Antisense | 5770 |
| 203915_at | 1156 | 701 | 2271 | GTTCCTTCATGTAACTTCCCTGAAA | Antisense | 5771 |
| 203915_at | 954 | 1093 | 2315 | TTTGAGAGTCTGTGACCCACTTACC | Antisense | 5772 |
| 204116_at | 475 | 1137 | 867 | TTCTGGCTGGAACGGACGATGCCCC | Antisense | 5773 |
| 204116_at | 606 | 821 | 917 | GGATCTTGTTACTGAATACCACGGG | Antisense | 5774 |
| 204116_at | 110 | 817 | 960 | GGTGTGTCTAAGGGACTGGCTGAGA | Antisense | 5775 |
| 204116_at | 902 | 173 | 997 | ACTACAGTGAACGACTCTGCCTCGT | Antisense | 5776 |
| 204116_at | 121 | 613 | 1009 | GACTCTGCCTCGTCAGTGAGATTCC | Antisense | 5777 |
| 204116_at | 998 | 707 | 1111 | GTTACACCCTAAAGCCTGAAACCTG | Antisense | 5778 |
| 204116_at | 845 | 241 | 1136 | AACCCCAATCCTCTGACAGAAGAAC | Antisense | 5779 |
| 204116_at | 309 | 819 | 1166 | GGTCCTGTAGCCCTAAGTGGTACTA | Antisense | 5780 |
| 204116_at | 1123 | 781 | 1182 | GTGGTACTAACTTTCCTTCATTCAA | Antisense | 5781 |
| 204116_at | 877 | 883 | 1242 | GGCTGATTTGGAATTTTGTGCCCCC | Antisense | 5782 |
| 204116_at | 453 | 285 | 1253 | AATTTTGTGCCCCCATGTAAGCACC | Antisense | 5783 |
| 204533_at | 589 | 1043 | 586 | TAACTCTACCCTGGCACTATAATGT | Antisense | 5784 |
| 204533_at | 638 | 507 | 613 | GCTCTACTGAGGTGCTATGTTCTTA | Antisense | 5785 |
| 204533_at | 218 | 1011 | 633 | TCTTAGTGGATGTTCTGACCCTGCT | Antisense | 5786 |
| 204533_at | 927 | 999 | 646 | TCTGACCCTGCTTCAAATATTTCCC | Antisense | 5787 |
| 204533_at | 268 | 827 | 692 | GGTACTAAGGAATCTTTCTGCTTTG | Antisense | 5788 |
| 204533_at | 206 | 475 | 711 | GCTTTGGGGTTTATCAGAATTCTCA | Antisense | 5789 |
| 204533_at | 283 | 277 | 783 | AATGCTCTTTACTTCATGGACTTCC | Antisense | 5790 |
| 204533_at | 394 | 1121 | 791 | TTACTTCATGGACTTCCACTGCCAT | Antisense | 5791 |
| 204533_at | 1139 | 9 | 833 | ATTCTTTCAGTGGCTACCTACATAC | Antisense | 5792 |
| 204533_at | 188 | 509 | 845 | GCTACCTACATACAATTCCAAACAC | Antisense | 5793 |
| 204533_at | 968 | 273 | 1105 | AATGAGGTACTCTCCTGGAAATATT | Antisense | 5794 |
| 205242_at | 195 | 847 | 632 | GGAGTTTGCATTCTTATTCATCAGG | Antisense | 5795 |
| 205242_at | 602 | 591 | 842 | GAAAGACTCAAAAAGCTGCCTGGGA | Antisense | 5796 |
| 205242_at | 551 | 875 | 867 | GGCAGATGGAACTTGAGCCTGTCAA | Antisense | 5797 |
| 205242_at | 516 | 51 | 903 | ATCCATGTAGTAGATATCCTCTGCT | Antisense | 5798 |
| 205242_at | 1011 | 49 | 918 | ATCCTCTGCTTAAAAACTCACTACG | Antisense | 5799 |
| 205242_at | 112 | 285 | 1001 | AATAGCATTCGAAGATCCCCAGACT | Antisense | 5800 |
| 205242_at | 149 | 677 | 1014 | GATCCCCAGACTTCATAGAATACTC | Antisense | 5801 |
| 205242_at | 1073 | 925 | 1061 | TGTACACATGTATCCTTTCACACAT | Antisense | 5802 |
| 205242_at | 988 | 1101 | 1076 | TTTCACACATTTGCCTTGACAAACT | Antisense | 5803 |
| 205242_at | 208 | 949 | 1092 | TGACAAACTTCTTTCACTCACATCT | Antisense | 5804 |
| 205242_at | 350 | 813 | 1151 | GGGGACTCTGGTATCTAATTCTTTA | Antisense | 5805 |
| 205488_at | 857 | 321 | 373 | CAGCCACACGCGAAGGTGACCTTAA | Antisense | 5806 |
| 205488_at | 988 | 619 | 390 | GACCTTAAACTTTTACAGCTGACGG | Antisense | 5807 |
| 205488_at | 301 | 1077 | 435 | TATGTGACTATCCTTCATCTACCTA | Antisense | 5808 |
| 205488_at | 5 | 865 | 483 | GGAACCATGTGCCAAGTTGCAGGGT | Antisense | 5809 |
| 205488_at | 911 | 611 | 515 | GACTCACAATAGTGCATCTTGGTCC | Antisense | 5810 |
| 205488_at | 45 | 523 | 528 | GCATCTTGGTCCGATACTCTGAGAG | Antisense | 5811 |
| 205488_at | 1048 | 965 | 641 | TGCTGGAAGCCTCCGAGGTGGAAGA | Antisense | 5812 |
| 205488_at | 533 | 931 | 697 | TGTTGTGCGAGGGTGTTTTCCGAGG | Antisense | 5813 |
| 205488_at | 741 | 281 | 744 | AATAAATGCGGAGACCCTCGTGGGC | Antisense | 5814 |
| 205488_at | 659 | 405 | 769 | CTGGTGTCTATATTCTTCTCTCAAA | Antisense | 5815 |
| 205488_at | 672 | 373 | 786 | CTCTCAAAGAAACACCTCAACTGGA | Antisense | 5816 |
| 205758_at | 463 | 323 | 1584 | CAGCCCTTGCATTGCAGAGGGGCCC | Antisense | 5817 |
| 205758_at | 1044 | 947 | 1610 | TGAAAGAGGACAGGCTACCCCTTTA | Antisense | 5818 |
| 205758_at | 210 | 217 | 1663 | AAACTAAGGCCCTCTTGAATCTCTG | Antisense | 5819 |
| 205758_at | 1134 | 681 | 1695 | GATACAAACATGTTCCTGGGATCAC | Antisense | 5820 |
| 205758_at | 390 | 123 | 1743 | AGACAATTGTTGGAGAGCCCCTCAC | Antisense | 5821 |
| 205758_at | 338 | 59 | 1804 | ATGAGGCAGACCTGACTCTCTTAAG | Antisense | 5822 |
| 205758_at | 858 | 237 | 1844 | AACTGCTGTCCCAAACATGCACTTC | Antisense | 5823 |
| 205758_at | 774 | 217 | 1856 | AAACATGCACTTCCTTGCTTAAGGT | Antisense | 5824 |
| 205758_at | 546 | 69 | 1881 | ATGGTACAAGCAATGCCTGCCCATT | Antisense | 5825 |
| 205758_at | 190 | 1077 | 1982 | TATGGTGTACATTCTTCCTGATTAT | Antisense | 5826 |
| 205758_at | 1084 | 359 | 1995 | CTTCCTGATTATTTTCTACACATAC | Antisense | 5827 |
| 205890_s_at | 632 | 625 | 195 | GATCTTAAAGCCACGGAGAAGCCTC | Antisense | 5828 |
| 205890_s_at | 247 | 969 | 293 | TGCCCTTGTTTCTTGTGGAGTCAGG | Antisense | 5829 |
| 205890_s_at | 584 | 59 | 320 | ATGAGGCAAAGAGGCACCTCCTCCA | Antisense | 5830 |
| 205890_s_at | 578 | 561 | 350 | GAAGGTCCAGCTCAGTGGCACAAGT | Antisense | 5831 |
| 205890_s_at | 767 | 615 | 396 | GACGGGTATAATCCCTGAGACCCAG | Antisense | 5832 |
| 205890_s_at | 615 | 619 | 414 | GACCCAGATTGTGACTTGCAATGGA | Antisense | 5833 |
| 205890_s_at | 783 | 113 | 481 | AGAAAGGGCAACTTACTCTTCCTGG | Antisense | 5834 |
| 205890_s_at | 67 | 173 | 495 | ACTCTTCCTGGCATCTTATTGTATT | Antisense | 5835 |
| 205890_s_at | 814 | 279 | 578 | AATCTCTTACTCAACGAACACATCT | Antisense | 5836 |
| 205890_s_at | 573 | 349 | 598 | CATCTTCTGATGATTTCCCAAAATT | Antisense | 5837 |
| 205890_s_at | 415 | 7 | 678 | ATTGCCCAACTCTATGTTTCTTTGA | Antisense | 5838 |
| 206134_at | 437 | 367 | 1600 | CTTTCTATATTGTTATCAGTCCAGG | Antisense | 5839 |
| 206134_at | 424 | 607 | 1650 | GACATTGGCTCTTTGTTTAGGCCTA | Antisense | 5840 |
| 206134_at | 26 | 551 | 1725 | GAATTTGTGACTTAGTTCTGCCCTT | Antisense | 5841 |
| 206134_at | 512 | 591 | 1762 | GAAAGCAGTCTTCCATCAAATCACC | Antisense | 5842 |
| 206134_at | 398 | 275 | 1791 | AATGCACGGCTAAACTATTCAGAGT | Antisense | 5843 |
| 206134_at | 1079 | 259 | 1841 | AAGTACTATGCTTTAATGCTTCTTT | Antisense | 5844 |
| 206134_at | 443 | 517 | 1858 | GCTTCTTTCATCTTACTAGTATGGC | Antisense | 5845 |
| 206134_at | 791 | 1077 | 1953 | TATGTTATTCCTCTGTGTTCACTTC | Antisense | 5846 |
| 206134_at | 539 | 177 | 1973 | ACTTCGCCTTGCTCTTGAAAGTGCA | Antisense | 5847 |
| 206134_at | 1134 | 721 | 2055 | GTATATCCTATACACACATCTCCTT | Antisense | 5848 |
| 206134_at | 103 | 943 | 2104 | TGAGAAGTCTACATTGCTTACATTT | Antisense | 5849 |
| 206666_at | 531 | 211 | 471 | AAACCTCTCTTAGATCTGGAACCAA | Antisense | 5850 |
| 206666_at | 1105 | 147 | 517 | AGCCACCGATCCAGATTCATTAAGA | Antisense | 5851 |
| 206666_at | 321 | 1131 | 532 | TTCATTAAGACCTTCTGACACCCTG | Antisense | 5852 |
| 206666_at | 404 | 191 | 549 | ACACCCTGCGAGAAGTCACTGTTAC | Antisense | 5853 |
| 206666_at | 594 | 813 | 696 | GGGGCCCCTTGATCTGTAAAGGTGT | Antisense | 5854 |
| 206666_at | 586 | 207 | 713 | AAAGGTGTCTTCCACGCTATAGTCT | Antisense | 5855 |
| 206666_at | 673 | 785 | 753 | GTGGTGTTGCCACAAAGCCTGGAAT | Antisense | 5856 |
| 206666_at | 972 | 867 | 773 | GGAATCTACACCCTGTTAACCAAGA | Antisense | 5857 |
| 206666_at | 335 | 905 | 809 | TGGATCAAAAGCAACCTTGTCCCGC | Antisense | 5858 |
| 206666_at | 590 | 757 | 827 | GTCCCGCCTCATACAAATTAAGTTA | Antisense | 5859 |
| 206666_at | 448 | 1075 | 935 | TATGGGGTCCATTTTTGCACTTGTA | Antisense | 5860 |
| 207651_at | 757 | 1147 | 828 | TTGCCTTGTAATTCGACAGCTCTAC | Antisense | 5861 |
| 207651_at | 1133 | 175 | 906 | ACTTTTAGTGACCACGGGCTACATC | Antisense | 5862 |
| 207651_at | 103 | 795 | 921 | GGGCTACATCATATGCTTTGTTCCT | Antisense | 5863 |
| 207651_at | 23 | 31 | 968 | ATACCCTCAGCCAGACAGAAGTCAT | Antisense | 5864 |
| 207651_at | 997 | 563 | 985 | GAAGTCATAACTGATTGCTCAACCA | Antisense | 5865 |
| 207651_at | 1084 | 961 | 1000 | TGCTCAACCAGGATTTCACTCTTCA | Antisense | 5866 |
| 207651_at | 572 | 245 | 1025 | AAGCCAAAGAGGCTACACTGCTCCT | Antisense | 5867 |
| 207651_at | 1026 | 961 | 1066 | TGCTTTGATCCTATCCTGTACTATC | Antisense | 5868 |
| 207651_at | 257 | 211 | 1099 | AAAGCATTCCGCTCAAAGGTCACTG | Antisense | 5869 |
| 207651_at | 1005 | 1027 | 1118 | TCACTGAGACTTTTGCCTCACCTAA | Antisense | 5870 |
| 207651_at | 800 | 959 | 1208 | TGCTACCAATTCTGGCCTTACTGGA | Antisense | 5871 |
| 209606_at | 595 | 493 | 1164 | GAATTGCAAAACTGACATCCCATTT | Antisense | 5872 |
| 209606_at | 140 | 169 | 1174 | ACTGACATCCCATTTCACAGCAATA | Antisense | 5873 |
| 209606_at | 1008 | 309 | 1189 | CACAGCAATAGTGACCTTTATTTAA | Antisense | 5874 |
| 209606_at | 778 | 697 | 1217 | GTTGTGTTATAGTTTATGCTTCTTA | Antisense | 5875 |
| 209606_at | 422 | 1099 | 1249 | TTTCAACCTAAACAGCCAATTTCTA | Antisense | 5876 |
| 209606_at | 735 | 189 | 1260 | ACAGCCAATTTCTAAGCAGACAGGA | Antisense | 5877 |
| 209606_at | 240 | 1087 | 1369 | TATTTTCTAGATTATCCCTGTGAAT | Antisense | 5878 |
| 209606_at | 292 | 201 | 1485 | AAATCTTAGGTTTGCTTATGCCCAG | Antisense | 5879 |
| 209606_at | 775 | 499 | 1590 | GCTGTTTCTCACATCTATAGTGACA | Antisense | 5880 |
| 209606_at | 195 | 25 | 1639 | ATAGGAGGGGTTAAGGTTCATGAGA | Antisense | 5881 |
| 209606_at | 790 | 823 | 1679 | GGTCTGAGATGGGTGCTGCAAAGAT | Antisense | 5882 |
| 209795_at | 451 | 1071 | 1143 | TAGTCTAATTGAATCCCTTAAACTC | Antisense | 5883 |
| 209795_at | 691 | 67 | 1273 | ATGGGATGATCGTGTATTTATTTTT | Antisense | 5884 |
| 209795_at | 665 | 1107 | 1294 | TTTTTTACTTCCTCAGCTGTAGACA | Antisense | 5885 |
| 209795_at | 1000 | 177 | 1300 | ACTTCCTCAGCTGTAGACAGGTCCT | Antisense | 5886 |
| 209795_at | 563 | 603 | 1315 | GACAGGTCCTTTTCGATGGTACATA | Antisense | 5887 |
| 209795_at | 188 | 907 | 1331 | TGGTACATATTTCTTTGCCTTTATA | Antisense | 5888 |
| 209795_at | 302 | 1083 | 1352 | TATAATCTTTTATACAGTGTCTTAC | Antisense | 5889 |
| 209795_at | 1015 | 773 | 1450 | GTGATGTGGCAAATCTCTATTAGGA | Antisense | 5890 |
| 209795_at | 970 | 21 | 1476 | ATATTCTGTAATCTTCAGACCTAGA | Antisense | 5891 |
| 209795_at | 859 | 83 | 1520 | AGGTTTGTGACTTTCCTAAATCAAT | Antisense | 5892 |
| 209795_at | 232 | 1059 | 1550 | TACGTGCAATACTTCAATACTTCAT | Antisense | 5893 |
| 210915_x_at | 1077 | 205 | 516 | AAAGGCCACACTGGTGTGCCTGGCC | Antisense | 5894 |
| 210915_x_at | 1116 | 945 | 651 | TGACTCCAGATACTGCCTGAGCAGC | Antisense | 5895 |
| 210915_x_at | 928 | 985 | 722 | TCCGCTGTCAAGTCCAGTTCTACGG | Antisense | 5896 |
| 210915_x_at | 495 | 419 | 807 | CGCCGAGGCCTGGGGTAGAGCAGAC | Antisense | 5897 |
| 210915_x_at | 185 | 1067 | 822 | TAGAGCAGACTGTGGCTTTACCTCG | Antisense | 5898 |
| 210915_x_at | 1098 | 461 | 875 | CCACCATCCTCTATGAGATCCTGCT | Antisense | 5899 |
| 210915_x_at | 577 | 109 | 890 | AGATCCTGCTAGGGAAGGCCACCAT | Antisense | 5900 |
| 210915_x_at | 857 | 269 | 904 | AAGGCCACCATGTATGCTGTGCTGG | Antisense | 5901 |
| 210915_x_at | 145 | 419 | 933 | CGCCCTTGTGTTGATGGCCATGGTC | Antisense | 5902 |
| 210915_x_at | 224 | 137 | 1001 | AGCTTCTAACCCGTCATGGTTTCAA | Antisense | 5903 |
| 210915_x_at | 864 | 293 | 1023 | CAATACACATTCTTCTTTTGCCAGC | Antisense | 5904 |
| 210972_x_at | 474 | 861 | 514 | GGAACAAGACTTCAGGTCACGCTCG | Antisense | 5905 |
| 210972_x_at | 393 | 1021 | 525 | TCAGGTCACGCTCGATATCCAGAAC | Antisense | 5906 |
| 210972_x_at | 111 | 949 | 591 | TGACAAGTCTGTCTGCCTATTCACC | Antisense | 5907 |
| 210972_x_at | 583 | 633 | 711 | GAGCAACAGTGCTGTGGCCTGGAGC | Antisense | 5908 |
| 210972_x_at | 60 | 525 | 751 | GCATGTGCAAACGCCTTCAACAACA | Antisense | 5909 |
| 210972_x_at | 317 | 987 | 800 | TCCCCAGCCCAGAAAGTTCCTGTGA | Antisense | 5910 |
| 210972_x_at | 461 | 701 | 815 | GTTCCTGTGATGTCAAGCTGGTCGA | Antisense | 5911 |
| 210972_x_at | 1124 | 335 | 884 | CAGTGATTGGGTTCCGAATCCTCCT | Antisense | 5912 |
| 210972_x_at | 920 | 263 | 914 | AAGTGGCCGGGTTTAATCTGCTCAT | Antisense | 5913 |
| 210972_x_at | 1017 | 497 | 948 | GCTGTGGTCCAGCTGAGATCTGCAA | Antisense | 5914 |
| 210972_x_at | 49 | 695 | 973 | GATTGTAAGACAGCCTGTGCTCCCT | Antisense | 5915 |
| 211796_s_at | 480 | 475 | 459 | GCCATCAGAAGCAGAGATCTCCCAC | Antisense | 5916 |
| 211796_s_at | 1017 | 445 | 618 | CCTCAATGACTCCAGATACTGCCTG | Antisense | 5917 |
| 211796_s_at | 464 | 295 | 621 | CAATGACTCCAGATACTGCCTGAGC | Antisense | 5918 |
| 211796_s_at | 927 | 985 | 695 | TCCGCTGTCAAGTCCAGTTCTACGG | Antisense | 5919 |
| 211796_s_at | 588 | 401 | 699 | CTGTCAAGTCCAGTTCTACGGGCTC | Antisense | 5920 |
| 211796_s_at | 538 | 331 | 709 | CAGTTCTACGGGCTCTCGGAGAATG | Antisense | 5921 |
| 211796_s_at | 612 | 995 | 724 | TCGGAGAATGACGAGTGGACCCAGG | Antisense | 5922 |
| 211796_s_at | 969 | 253 | 730 | AATGACGAGTGGACCCAGGATAGGG | Antisense | 5923 |
| 211796_s_at | 396 | 437 | 782 | CCGAGGCCTGGGGTAGAGCAGACTG | Antisense | 5924 |
| 211796_s_at | 704 | 439 | 788 | CCTGGGGTAGAGCAGACTGTGGCTT | Antisense | 5925 |
| 211796_s_at | 1147 | 937 | 917 | TGATGGCCATGGTCAAGAGAAAGGA | Antisense | 5926 |
| 212592_at | 641 | 723 | 859 | GTATCAAAATCTTCCAATTATCATG | Antisense | 5927 |
| 212592_at | 937 | 39 | 867 | ATCTTCCAATTATCATGCTCACCTG | Antisense | 5928 |
| 212592_at | 25 | 975 | 871 | TCCAATTATCATGCTCACCTGAAAG | Antisense | 5929 |
| 212592_at | 92 | 509 | 883 | GCTCACCTGAAAGAGGTATGCTCTC | Antisense | 5930 |
| 212592_at | 880 | 657 | 895 | GAGGTATGCTCTCTTAGGAATACAG | Antisense | 5931 |
| 212592_at | 700 | 1073 | 909 | TAGGAATACAGTTTCTAGCATTAAA | Antisense | 5932 |
| 212592_at | 187 | 1035 | 985 | TAATAAAATGTTCCTCGCATTCCCC | Antisense | 5933 |
| 212592_at | 374 | 103 | 1088 | AGTTTCACTGTGTAGAGAACATATA | Antisense | 5934 |
| 212592_at | 317 | 27 | 1122 | ATAGGTCAATTATATGTCTCCATTA | Antisense | 5935 |
| 212592_at | 790 | 217 | 1164 | AAACATGTTCTAGAACTAGTTACAA | Antisense | 5936 |
| 212592_at | 384 | 199 | 1248 | AAATATATTTGGACATAACAGACTT | Antisense | 5937 |
| 212999_x_at | 68 | 315 | 651 | CACTGCAGAATGAAGGAACATCCCT | Antisense | 5938 |
| 212999_x_at | 934 | 267 | 663 | AAGGAACATCCCTTGAGGTGACCCA | Antisense | 5939 |
| 212999_x_at | 96 | 423 | 684 | CCCAGCCAACCTGTGGCCAGAAGGA | Antisense | 5940 |
| 212999_x_at | 241 | 731 | 714 | GTACCTTGAAAAGACACTGAAAGCA | Antisense | 5941 |
| 212999_x_at | 138 | 737 | 753 | GTAAGGGTGGGCAGAGGAGGTAGAA | Antisense | 5942 |
| 212999_x_at | 969 | 35 | 779 | ATCAATTCAATTGTCGCATCATTCA | Antisense | 5943 |
| 212999_x_at | 172 | 293 | 787 | AATTGTCGCATCATTCATGGTTCTT | Antisense | 5944 |
| 212999_x_at | 43 | 757 | 791 | GTCGCATCATTCATGGTTCTTTAAT | Antisense | 5945 |
| 212999_x_at | 987 | 831 | 805 | GGTTCTTTAATATTGATGCTCAGTG | Antisense | 5946 |
| 212999_x_at | 201 | 453 | 922 | CCTTGGTCACTGGTGTTTCAAACAT | Antisense | 5947 |
| 212999_x_at | 299 | 1125 | 984 | TTAAGAAAGCATAACCAGCAATAAA | Antisense | 5948 |
| 213193_x_at | 1117 | 945 | 664 | TGACTCCAGATACTGCCTGAGCAGC | Antisense | 5949 |
| 213193_x_at | 926 | 985 | 735 | TCCGCTGTCAAGTCCAGTTCTACGG | Antisense | 5950 |
| 213193_x_at | 186 | 1067 | 835 | TAGAGCAGACTGTGGCTTTACCTCG | Antisense | 5951 |
| 213193_x_at | 1097 | 461 | 888 | CCACCATCCTCTATGAGATCCTGCT | Antisense | 5952 |
| 213193_x_at | 254 | 643 | 902 | GAGATCCTGCTAGGGAAGGCCACCC | Antisense | 5953 |
| 213193_x_at | 74 | 319 | 922 | CACCCTGTATGCTGTGCTGGTCAGC | Antisense | 5954 |
| 213193_x_at | 863 | 293 | 1036 | CAATACACATTCTTCTTTTGCCAGC | Antisense | 5955 |
| 213193_x_at | 1099 | 471 | 1055 | GCCAGCGCTTCTGAAGAGCTGCTCT | Antisense | 5956 |
| 213193_x_at | 522 | 155 | 1081 | ACCTCTCTGCATCCCAATAGATATC | Antisense | 5957 |
| 213193_x_at | 717 | 283 | 1096 | AATAGATATCCCCCTATGTGCATGC | Antisense | 5958 |
| 213193_x_at | 782 | 811 | 1158 | GGGGGACCTTAGCATGCCTAAGTGA | Antisense | 5959 |
| 213539_at | 163 | 799 | 265 | GGGAACACTGCTCTCAGACATTACA | Antisense | 5960 |
| 213539_at | 711 | 613 | 291 | GACTGGACCTGGGAAAACGCATCCT | Antisense | 5961 |
| 213539_at | 701 | 417 | 308 | CGCATCCTGGACCCACGAGGAATAT | Antisense | 5962 |
| 213539_at | 383 | 553 | 368 | GAATCTACCGTGCAAGTTCATTATC | Antisense | 5963 |
| 213539_at | 835 | 781 | 408 | GTGTGGAGCTGGATCCAGCCACCGT | Antisense | 5964 |
| 213539_at | 610 | 119 | 507 | AGACTGGAAGGCTGTCTGGGGCTGC | Antisense | 5965 |
| 213539_at | 108 | 971 | 529 | TGCCGACACACAAGCTCTGTTGAGG | Antisense | 5966 |
| 213539_at | 964 | 867 | 552 | GGAATGACCAGGTCTATCAGCCCCT | Antisense | 5967 |
| 213539_at | 659 | 145 | 570 | AGCCCCTCCGAGATCGAGATGATGC | Antisense | 5968 |
| 213539_at | 1113 | 961 | 592 | TGCTCAGTACAGCCACCTTGGAGGA | Antisense | 5969 |
| 213539_at | 892 | 569 | 659 | GAAGCAGCCATTACCAACTGTACCT | Antisense | 5970 |
| 214617_at | 814 | 465 | 1921 | CCAACGCAAATTCGCAAACTTTCTT | Antisense | 5971 |
| 214617_at | 318 | 507 | 1990 | GCTCATCGGCTATCGTTAGTGCTAG | Antisense | 5972 |
| 214617_at | 173 | 963 | 2009 | TGCTAGTGGATTTTACATGTGGCCC | Antisense | 5973 |
| 214617_at | 927 | 105 | 2073 | AGATTGGATACGCATCAGACAGATG | Antisense | 5974 |
| 214617_at | 1040 | 655 | 2127 | GAGGTGGCTGGGTTTACACGCTAAT | Antisense | 5975 |
| 214617_at | 220 | 805 | 2136 | GGGTTTACACGCTAATCCCGATTCA | Antisense | 5976 |
| 214617_at | 736 | 529 | 2203 | GCAGTCACAGCTACACAGATCACAG | Antisense | 5977 |
| 214617_at | 52 | 477 | 2331 | GCCTTCATTGCCTTAACTGGAGCCC | Antisense | 5978 |
| 214617_at | 212 | 295 | 2389 | CAATGCTTTGCCCCTGAGACAAATG | Antisense | 5979 |
| 214617_at | 1085 | 597 | 2406 | GACAAATGGAGGCCTGTCCTGACCT | Antisense | 5980 |
| 214617_at | 566 | 157 | 2427 | ACCTGTCTCACCATGTACATAGCTT | Antisense | 5981 |
| 216920_s_at | 416 | 313 | 881 | CACTACTGCTGCAGCTCACAAACAC | Antisense | 5982 |
| 216920_s_at | 585 | 509 | 894 | GCTCACAAACACCTCTGCATATTAC | Antisense | 5983 |
| 216920_s_at | 504 | 1001 | 907 | TCTGCATATTACATGTACCTCCTCC | Antisense | 5984 |
| 216920_s_at | 513 | 783 | 944 | GTGTGGTCTATTTTGCCATCATCAC | Antisense | 5985 |
| 216920_s_at | 940 | 891 | 1115 | GGCCATTTCAGTTCTCATGTGTGTA | Antisense | 5986 |
| 216920_s_at | 978 | 829 | 1161 | GGTTTTCAAACCAGTGGGCACACAG | Antisense | 5987 |
| 216920_s_at | 584 | 989 | 1323 | TCCCTCTCTTAGTGTTCTTTAATCA | Antisense | 5988 |
| 216920_s_at | 126 | 35 | 1349 | ATAACTGCCTGGAAGCCTTTCATTT | Antisense | 5989 |
| 216920_s_at | 170 | 897 | 1358 | TGGAAGCCTTTCATTTTACACGCCC | Antisense | 5990 |
| 216920_s_at | 1055 | 417 | 1378 | CGCCCTGAAGCAGTCTTCTTTGCTA | Antisense | 5991 |
| 216920_s_at | 1041 | 1115 | 1409 | TTATGTGGTGTGTTTTTCCGTAATA | Antisense | 5992 |
| 217147_s_at | 440 | 1003 | 1036 | TCTCCTTTCTCACCAATGGGCAATA | Antisense | 5993 |
| 217147_s_at | 398 | 981 | 1038 | TCCTTTCTCACCAATGGGCAATAGC | Antisense | 5994 |
| 217147_s_at | 256 | 1087 | 1149 | TATTTTTCCCAAAGATAGCTTTACT | Antisense | 5995 |
| 217147_s_at | 565 | 743 | 1186 | GTCAAATTAATGCATGCTCCTTACA | Antisense | 5996 |
| 217147_s_at | 863 | 275 | 1194 | AATGCATGCTCCTTACAACAAACAA | Antisense | 5997 |
| 217147_s_at | 1061 | 53 | 1199 | ATGCTCCTTACAACAAACAAATATC | Antisense | 5998 |
| 217147_s_at | 559 | 647 | 1229 | GAGTTTAGGAATTCTACTAGCCAGA | Antisense | 5999 |
| 217147_s_at | 368 | 173 | 1244 | ACTAGCCAGAGATAGTCACTTGGAG | Antisense | 6000 |
| 217147_s_at | 635 | 685 | 1254 | GATAGTCACTTGGAGAAACTTTCTA | Antisense | 6001 |
| 217147_s_at | 69 | 589 | 1268 | GAAACTTTCTATATATCCTTCTAAA | Antisense | 6002 |
| 217147_s_at | 102 | 319 | 1480 | CACCCCACTGATAACCAAATCACAG | Antisense | 6003 |
| 222838_at | 228 | 229 | 2352 | AACACCTGTGCTAGGTCAGTCTGGC | Antisense | 6004 |
| 222838_at | 971 | 509 | 2361 | GCTAGGTCAGTCTGGCACGTAAGAT | Antisense | 6005 |
| 222838_at | 805 | 755 | 2370 | GTCTGGCACGTAAGATGAACATCCC | Antisense | 6006 |
| 222838_at | 1054 | 1039 | 2380 | TAAGATGAACATCCCTACCAACACA | Antisense | 6007 |
| 222838_at | 728 | 629 | 2405 | GAGCTCACCATCTCTTATACTTAAG | Antisense | 6008 |
| 222838_at | 821 | 61 | 2473 | ATGTTCCCTGACACATATCTTGAAT | Antisense | 6009 |
| 222838_at | 479 | 179 | 2485 | ACATATCTTGAATGGAGACCTCCCT | Antisense | 6010 |
| 222838_at | 379 | 119 | 2500 | AGACCTCCCTACCAAGTGATGAAAG | Antisense | 6011 |
| 222838_at | 520 | 805 | 2565 | GGGATTGAGGATTATCTTCTCTCAG | Antisense | 6012 |
| 222838_at | 382 | 1013 | 2579 | TCTTCTCTCAGAAAGGCATTGTGAA | Antisense | 6013 |
| 222838_at | 797 | 447 | 2626 | CCTACTGCAAAACCCTATTGTAGTA | Antisense | 6014 |
| 222895_s_at | 1120 | 703 | 3909 | GTTCTCTCATTTAATGCACACTGAT | Antisense | 6015 |
| 222895_s_at | 361 | 941 | 4003 | TGAGTTCCATCAGAAGGTGCCCAGC | Antisense | 6016 |
| 222895_s_at | 203 | 1107 | 4051 | TTTTTTCCTATCTCATTAGGTTGGA | Antisense | 6017 |
| 222895_s_at | 216 | 9 | 4114 | ATTCTGTTGACCCGCACTTTAAAGC | Antisense | 6018 |
| 222895_s_at | 821 | 5 | 4178 | ATTGCAGCATATTCTTCTCTTTGGC | Antisense | 6019 |
| 222895_s_at | 1015 | 9 | 4188 | ATTCTTCTCTTTGGCCCAGAGGTGG | Antisense | 6020 |
| 222895_s_at | 758 | 651 | 4240 | GAGTGTCAGTATTGCTAAGCGTGGC | Antisense | 6021 |
| 222895_s_at | 1024 | 493 | 4258 | GCGTGGCATTCACAATACTGGCACT | Antisense | 6022 |
| 222895_s_at | 788 | 713 | 4318 | GTTTTTCTACTGCCATTCAATTTGA | Antisense | 6023 |
| 222895_s_at | 687 | 773 | 4344 | GTGAGTGCCTTGAAAACTGATCTTC | Antisense | 6024 |
| 222895_s_at | 948 | 41 | 4363 | ATCTTCCTATTTGAGTCTCTTGAGA | Antisense | 6025 |
| 226218_at | 938 | 375 | 979 | CTAATTGGTTCTGCCCAATCTCCTT | Antisense | 6026 |
| 226218_at | 739 | 943 | 1126 | TGACTGGGTCTAGGGCACCCAGGCT | Antisense | 6027 |
| 226218_at | 810 | 691 | 1151 | GATTCAGCTGATTTCCTACCAGCCT | Antisense | 6028 |
| 226218_at | 730 | 1075 | 1229 | TATGGGCTGTTCAGAGGTGCACACC | Antisense | 6029 |
| 226218_at | 1063 | 249 | 1283 | AAGAGACTTGGTACGGGCCAGGAAG | Antisense | 6030 |
| 226218_at | 819 | 551 | 1307 | GAATATGTGGCAGAGCTCCTGGAAA | Antisense | 6031 |
| 226218_at | 949 | 1073 | 1342 | TAGGTGGCATTTTTGTCAGCTCTGT | Antisense | 6032 |
| 226218_at | 721 | 745 | 1356 | GTCAGCTCTGTGGTTTATTGTTGGG | Antisense | 6033 |
| 226218_at | 938 | 199 | 1392 | AAATATCCATTGTTCACTACAGTGA | Antisense | 6034 |
| 226218_at | 984 | 157 | 1431 | ACCGTGTACTATCCACATGCATTAC | Antisense | 6035 |
| 226218_at | 64 | 13 | 1451 | ATTACAAACATTTCGCAGAGCTGCT | Antisense | 6036 |
| 227346_at | 745 | 961 | 407 | TGCTTTTGGTGCGATGGCACTCACT | Antisense | 6037 |
| 227346_at | 845 | 547 | 460 | GCAATATTGTTTCCAATACTTTCTA | Antisense | 6038 |
| 227346_at | 374 | 783 | 507 | GTGTGGTGATTGTTCAGGTCGAATC | Antisense | 6039 |
| 227346_at | 83 | 85 | 522 | AGGTCGAATCTGTTGTATCCAGTAC | Antisense | 6040 |
| 227346_at | 359 | 51 | 538 | ATCCAGTACAGCTTTAGGTCTTCAG | Antisense | 6041 |
| 227346_at | 120 | 393 | 563 | CTGCCCTTCTGGCGAGTACATGCAC | Antisense | 6042 |
| 227346_at | 211 | 959 | 606 | TGCAGTCATATTTCCAGTCTGCCTC | Antisense | 6043 |
| 227346_at | 628 | 977 | 618 | TCCAGTCTGCCTCTATGATGATGTT | Antisense | 6044 |
| 227346_at | 207 | 583 | 664 | GAACAAGGGATGTACCACTGGAGGA | Antisense | 6045 |
| 227346_at | 682 | 647 | 692 | GAGTATCCTTTTGTACACATTTTGA | Antisense | 6046 |
| 227346_at | 65 | 277 | 717 | AATGCTTCTTCTGTAGTGATAGAAC | Antisense | 6047 |
| 228362_s_at | 397 | 733 | 22 | GTACTGGCCCTTCGGATTGAAAGTA | Antisense | 6048 |
| 228362_s_at | 842 | 345 | 76 | CATGCTTGGAGTGTTATATTCTTTT | Antisense | 6049 |
| 228362_s_at | 383 | 21 | 91 | ATATTCTTTTGGATGCGAGCCCTCA | Antisense | 6050 |
| 228362_s_at | 1068 | 491 | 105 | GCGAGCCCTCAAAGAAACATTTAAT | Antisense | 6051 |
| 228362_s_at | 564 | 1125 | 125 | TTAATATTCTCTTTTGCCAATTCAG | Antisense | 6052 |
| 228362_s_at | 1118 | 467 | 140 | GCCAATTCAGTTGCATGCTCTGTGG | Antisense | 6053 |
| 228362_s_at | 885 | 523 | 152 | GCATGCTCTGTGGCTTTACTTTTAA | Antisense | 6054 |
| 228362_s_at | 908 | 1121 | 167 | TTACTTTTAAGGATCTGCTGCTCCT | Antisense | 6055 |
| 228362_s_at | 444 | 27 | 199 | ATAGATTTTCCAGAATTTCAGCTGC | Antisense | 6056 |
| 228362_s_at | 191 | 239 | 232 | AACTGGAGATAGGCATCGGGTGACA | Antisense | 6057 |
| 228362_s_at | 893 | 237 | 286 | AACTGCTATCAAGATCCAGCCCAAC | Antisense | 6058 |
| 229152_at | 192 | 953 | 20 | TGAAGAAAGTTCTCCTCCTGATCAC | Antisense | 6059 |
| 229152_at | 858 | 387 | 34 | CTCCTGATCACAGCCATCTTGGCAG | Antisense | 6060 |
| 229152_at | 299 | 455 | 47 | CCATCTTGGCAGTGGCTGTTGGTTT | Antisense | 6061 |
| 229152_at | 343 | 603 | 115 | GACAGCGATGAATTAGCTTCAGGGT | Antisense | 6062 |
| 229152_at | 793 | 975 | 177 | TCCACCAATTCCATTTCCAAGATTT | Antisense | 6063 |
| 229152_at | 136 | 257 | 195 | AAGATTTCCATGGTTTAGACGTAAT | Antisense | 6064 |
| 229152_at | 502 | 1067 | 210 | TAGACGTAATTTTCCTATTCCAATA | Antisense | 6065 |
| 229152_at | 194 | 369 | 224 | CTATTCCAATACCTGAATCTGCCCC | Antisense | 6066 |
| 229152_at | 124 | 209 | 287 | AAAGTCACGATAAACCTGGTCACCT | Antisense | 6067 |
| 229152_at | 1068 | 199 | 382 | AAATAGCACACAGCATTCTCTAGTC | Antisense | 6068 |
| 229152_at | 142 | 25 | 408 | ATATCTTTAGTGATCTTCTTTAATA | Antisense | 6069 |
| 231577_s_at | 400 | 863 | 256 | GGAACAGGAGCAACTACTAAAAGAG | Antisense | 6070 |
| 231577_s_at | 96 | 681 | 316 | GATACAGGATCTCCAGACGAAAATG | Antisense | 6071 |
| 231577_s_at | 274 | 639 | 340 | GAGACGACGAAAGGCATGTACCATA | Antisense | 6072 |
| 231577_s_at | 313 | 877 | 352 | GGCATGTACCATAAGCTAAAGACCA | Antisense | 6073 |
| 231577_s_at | 1053 | 373 | 367 | CTAAAGACCAGAGCCTTCCTGTCAC | Antisense | 6074 |
| 231577_s_at | 227 | 925 | 386 | TGTCACCCCTAACCAAGGCATAATT | Antisense | 6075 |
| 231577_s_at | 43 | 551 | 423 | GAATTTGGAACAAGCGTCACTACAT | Antisense | 6076 |
| 231577_s_at | 1095 | 861 | 429 | GGAACAAGCGTCACTACATTTGATA | Antisense | 6077 |
| 231577_s_at | 249 | 247 | 434 | AAGCGTCACTACATTTGATAATAAT | Antisense | 6078 |
| 231577_s_at | 616 | 209 | 481 | AAAGTTTATAAAGGCATGTGGTACA | Antisense | 6079 |
| 231577_s_at | 216 | 877 | 493 | GGCATGTGGTACAATGATCAAAATC | Antisense | 6080 |
| 236280_at | 531 | 223 | 245 | AAAAGATCTCTCACTGGGAAAAGAA | Antisense | 6081 |
| 236280_at | 235 | 713 | 301 | GTTTTCCTTGTACTTTATTAATCTG | Antisense | 6082 |
| 236280_at | 647 | 553 | 325 | GAATCTAATGGCACTTCCTTACGAG | Antisense | 6083 |
| 236280_at | 902 | 363 | 342 | CTTACGAGGGTTTTCAGATGTGCTT | Antisense | 6084 |
| 236280_at | 1064 | 57 | 391 | ATGACTACACAGACAGTCCTACTCT | Antisense | 6085 |
| 236280_at | 326 | 605 | 402 | GACAGTCCTACTCTGAGGAGATGAC | Antisense | 6086 |
| 236280_at | 501 | 567 | 431 | GAAGAAACCCATTTGGAACTACACA | Antisense | 6087 |
| 236280_at | 229 | 863 | 479 | GGAACTGCAATCCTCAAGAGTCACA | Antisense | 6088 |
| 236280_at | 736 | 255 | 494 | AAGAGTCACACTTCATATTCCTTCC | Antisense | 6089 |
| 236280_at | 815 | 1145 | 511 | TTCCTTCCTTTCAAGTGGTTGATAA | Antisense | 6090 |
| 236280_at | 369 | 231 | 585 | AACATGCTTTTTATTTTGACTACCA | Antisense | 6091 |

The application's sequence listing, which the Patent Office published only in electronic form, follows.

SEQUENCE LISTING (6106 sequences)

SEQ ID NO: 1 - DNA, 206 bp, Homo sapiens
atgttcactgtatgtgccaagcctaatatgagagctatgtattatagagtttatgctacagccctaccttcaggaaacttatctactggacaaacaaaaattttcaaatatacaaaaaattctaaatcgaacattgtaattatctagcataggcaaatatagacagtaacagacaggtttacaattattaagaaagggcagccagg

SEQ ID NO: 2 - DNA, 418 bp, Homo sapiens
taccatagcaagttcttatcctttgttaatatattataaatacgacttttttcctttacctgtcacagtaatatgccaatttttggtgtcgctttagtaatttttttgggggggactgtcaaatttcagtaaactttataggctatagtttacaatttaaggtctttcctcagttgtctcctaaaaaattttgtggaaatcgaaatttcttttcaattgatcgtcttgtgcagccctttaaaaaatgcgttttgcattcatgtctttgcagtacaaatctgtatctttcattttgggagtgactgtcatagatgggtaatataaagtgacaacacacacaccagggccagattgcgtgggttctagctagggacctagagctggttacttgatttctctctgttccatttactatctg

SEQ ID NO: 3 - DNA, 522 bp, Homo sapiens
agggctcatcgacatcgagaaccccaaccgggtggcacagacaaccaaaaaggtcacacaactggatctggacgggccaaaggagctttcgaggagagaacgagaagagattgagaagcagaaggcaaaagagcgttacatgaaaatgcacttggccgggaagacagagcaagccaaggctgacctggcccggctggccatcatccggaaacagcgggaggaggctgcccggaagaaggaagaggaaaggaaagcaaaagacgatgccacattgtcaggaaaacgaatgcagtcactctccctgaataagtaactgcgacccgtgggaggagatgccggggacctgggccgcgctgccaggacctctgctgtgtctcgcccaccctgtgccctggcgccgctgcaacagcccctcatggccaggagccccccatgcctgggcctcctcttcatcttggcacagaaattgtttgggggatgggggggggactgggggaggggtagctgctatctttgagacag

SEQ ID NO: 4 - DNA, 493 bp, Homo sapiens
aggaaataacccagttctgcaccactggtttttgtagctatctcgtaaggctgctggctgaaaactgtgtctatgcaaccttccaagtgcggagtgtcaaccaactggacgggagagagtactgctcctactccaggactctcacaaagctgatgagctgtacttcagaaaaaaataataatttccatgttttgtatatatctgacaaaactggcaacatcttacagactactgacttgaagacaacctcttttatatttctctatttctgggctgatgaatttgttttcatctgtcttttcccccttcagaattttccttggaaaaaaaatactagcctagctggtcatttctttgtaaggtagttagcaattttaagtctttctttggtcaacttttttttaatgtgaaaagttaggtaagacacttttttactgcttttatgtttttctgtcttgttttgagaccatgatggttacacttttggttccta

SEQ ID NO: 5 - DNA, 504 bp, Homo sapiens
tcaagaattcactgatctgatgcaaaataaaaatttatcattacatcttgaacccaggaagcttacagcaaagagactatgctttatgacgtcagcaatagataattccacgttgcctttgtgatttgtatatatagcttacatttgtggaccactacatagccagattcaaaaatattttacttgttccatccacagttctctacagaaagaaccaatgaacccaataggaacaaattctctgtggaaaacaaagcatagctgtagtagatacgaatccaatcacagaggaaacaggaagagaaaaacatccaagactacagtgaaaactggaaatggtctgttttcgtgatattcgtatgattaagatgcaaattttttcttaggaaaatgtgattgttaactagcattctgttttacatgttgacatttctaacacacacaccactgatttgaacttcaaaatttattttctgattatatatgctaggtctgattctgaag

SEQ ID NO: 6 - DNA, 454 bp, Homo sapiens
gaagcatatccagagggcgaaagatatctctccattgtgcatctgcctcttttgacgttggaagacacatgtcttactccccaaagggagcccagcactgggagccttcttgatgatctcaaaaataatagctattcaagaaaatcaccaagtgactgtgaaaccgtcagttcggaaggctggttagaacatgtgggagcaacatgaatgttctacaaaagtttaaagcagagattgtttcaaatgggtgtagtagatattactgaaaaccaaaaaagagtgagattgtcagtgtaagaatgtgatttaatgtttgtagtgcttacaattttgtgtaccaactggatgactaaaaagagtaaaataacttaattaatagctcatattttatgtgtgaaaacatgttagtgaacatatataatcaaaatagatttcattgctattgcatagtctc

SEQ ID NO: 7 - DNA, 432 bp, Homo sapiens
  misc_feature (0)...(0): n is c, t, a or g
gactatttcaaagctactgttcctagtccagctttaagtttcggtaagaaacatgctgttttgtttcatgatttcgttaattatggaaatttggcattgagggattattttattgagggtagaagagattccagaatcatcatctgtgatgatggtgtcctttagggctcttggagcagccagaccatgtttccaagagaaacctggtgatattgccagcagaccccctgccatccccccnagttgtcctggggctgaatgggcaaatctgtccaaacagctagtaaccggctgtgagggagagggtcagaagcacttagcgttggcctctgattgctgtcctctcttgtcctcttcccactccaatgatgaaaatgattttctctaaatgcctgggtaaggatgctttcaaggagctcacttggcctgctt

SEQ ID NO: 8 - DNA, 253 bp, Homo sapiens
  misc_feature (0)...(0): n is c, t, a or g
tctcctcgtggatcgtgtatcccagcggcaaggtgtatgtggcagcngtgcgcctggagcgtgtggtgctgacctgtgagctatgccggccctgggcagaggtgcgctggaccaaggatggagaggaggtggtggagagccccgcgctgctcctgcagaaggaagacactgtccgccgcctggtgctgcccgctgtccagctcgaggactccggcgagtacttgtgtgaaattgacgatgagtcggcctcctt

SEQ ID NO: 9 - DNA, 121 bp, Homo sapiens
gaaaaatccgtggaactgaagctgagatctttagtacgtggagtcaccttacagatacagagcatttatgcggtattcattggtgcctaaagaactttaggcatcctctggaaaaccggcc

SEQ ID NO: 10 - DNA, 429 bp, Homo sapiens
gaacaggtgaccataactctgccaaatatagaaagttgaaggaagtagtaaaattcagtatcgtaaagaacaacagcaacaacaaatgtggaattcagccaggactcccaatcttgtaaaacattctccatctgaagataagatgtccccagcatctccaatagatgatatcgaaagagaactgaaggcagaagctagtctaatggaccagatgagtagttgtgatagttcatcagattccaaaagttcatcatcttcaagtagtgaggatagttctagtgactcagaagatgaagattgcaaatcctctacttctgatacagggaattgtgtctcaggacatcctaccatgacacagtacaggattcctgatatagatgccagtcataatagatttcgagacaacagtggccttctgatgaatacttt

SEQ ID NO: 11 - DNA, 472 bp, Homo sapiens
ataagtcatttctaatctttgtataaaacagaagtgagcaagatgaatcagaaaaaaggtgttttgtattttaaaggtaacagataaccaggtgattgaatctaagacaggctgtaagcatcgctgagaaactaaaaggacttttgacttttatctggatagacatttctacagtaaaatcatggaaaggcatcagcattgcaaagtagcatctaggtagaaatcaggccaaaattaagctgtggtttccctctgagtagtgggaatagagaaaattaggaaattgtggttatgtgaatatttctttaaaacttttatgtacattatagtttattgcttcatatttaagtttagtttttaaggtaaaatgttattttgaacaaaaagacacttataattttccatacctattttcaactgaaggcaacttgtaagatttaactcagtcaataacatactggttttactcatc

SEQ ID NO: 12 - DNA, 437 bp, Homo sapiens
tgcctgtagcattccagagctcactgcccttctagatgtgccttcccgcttggcttccagcggcttgtgctcactctgtctgccaggtatgagaagaacacgtaagaccgccaccacactcaccctccctcaaggccctgtgccataggggtggccacccgacctgcccccagaacttttggatactggaggcagttgcataggtctccctctctgggcaccaggactcagtccagcccaagactactctgggcagctcccatcccagtctggggccatttgcagactcaggaaaggatttctacagtgttctataaaagccaaaagagagagtgggtttgggaagagtgagggtggttggggagaggggaccgatgtgcctcattgtttagtggtgattacaaatatgcttttctggataaagtttggttgtttgc

SEQ ID NO: 13 - DNA, 275 bp, Homo sapiens
  misc_feature (0)...(0): n is c, t, a or g
tacctctgtcgacctgtgaaactgaacaaacagcttatctgcccctaatgtgaaatgatgggacagacatagaataacnactacagtgattctagttcaaaatgagggaacatggaggggataaagaagtcantaacccaaaatagtttggaaatggagctgggcaaaatccagcaggagtttcttagttaggatccacagcctgggactgaccctctgtcctgtgggtctttgcctctgggctctctgctctgcatttcttgaaaccattatta

SEQ ID NO: 14 - DNA, 530 bp, Homo sapiens
  misc_feature (0)...(0): n is c, t, a or g
gatgttgaaacctgtttggcaccttctggaagctaccaaaaaaatgacactccattgaagtgcttaaaagctgttctcataagaattctactggcctattgtaaaaaagaaaaaaaaaangaaaaagaagaaagacacaaagaaaataatctaaacaccaaaaactaaacacaattccaatcctttttctgtacctcacgcgcataaattngctgctcctattttttttnctgttnatgtgttttnatggatctaagttaaatcttttggcaatatataaaaatgtaaatagtaaactttatttattaagaatgtcatcttttttaatttatatttacacaattgttcatctaatttattttttctatacagttttaaatactcagacatattttgctgttcatgatatttttatcctgttctcatggatttgttttcccatactgttttctctgatctcaattacaggttggatctcacaaataataatgtcagagacagaaatattttgccactgttgattactatac

SEQ ID NO: 15 - DNA, 351 bp, Homo sapiens
  misc_feature (0)...(0): n is c, t, a or g
gagacttcattggtgatacactcaatttttactgggtaattagctaataatgttggtcactgtctcacagttcaagtagctttaagatgatgtggcaaggaaaacacaaagcttttgggtaaccagcgttcttaaatgtatggtttttgaccaggtgaaccctttagaagtgatttctgttttaaaagtatgtacttaaaatacctttggctgtgatgaatgtagatcccagcagaataccaaaatcctattttttttgactgagtatttgtagatgcttaatgactgaaatgaatttggaggcactgatgaaagtgatttttttnaagttctcaggtactgttcaattat

SEQ ID NO: 16 - DNA, 471 bp, Homo sapiens
  misc_feature (0)...(0): n is c, t, a or g
gaaacacttttagagcacttgaggaacctaaaagatgactggttcagcattttgtgtggtagataagaaagaaattatcacaaaaaatcagaaatgaacagtgagagaaaaataggaccccagacagtttataccttccatttgctgttttaaaagtgtgagcctgccaagtcaacaagtatgcctttagcgcacatgtaaatagcctgcacttcctaaatctcgtgtggcctcccatggttacattcttcaaaggtnaactgagttgagaggaagattcagcatttaaaagagaagggttgaaaaagatnntgtgtgtgtgtgtgtgtgtgtttaattggcccagggttacttaaataaatcataaccattttgccacattctgtaactgtttagctaaggtcaaattaagtttaccctatggattttgtttcatcttttgtttcgtgtatatactgtttgcctttttca

SEQ ID NO: 17 - DNA, 485 bp, Homo sapiens
  misc_feature (0)...(0): n is c, t, a or g
tgagtcttttgaacacaggtatgaagtacaaagtgaatctaaaccaatgttacccctaccatacaggtatgttgtgttcacaaacacacacacacacacacacacaaattaaacatggtggaaatttttgacaaanttaaccacattaaatattctgtccattaagattccccaaagatggtgganngatngcagngttagtgngagaagatatttgcagcatgcaaggcaagatgacaatgcactaataacaaaatttcataaaacaatggacttggggcttgggaaaaataattatgacatgctttctgaagtgtccccagatagtttcataaaaaatggagcaaataggctaaagaaaaacccatagacatcatgttcaaaagaactgatgacaaggcatgttcataacccataaaatacaagtggatgcagctaaataactgcaatacttttgaaagagtttggcaggtttcgaagatgtg

SEQ ID NO: 18 - DNA, 421 bp, Homo sapiens
  misc_feature (0)...(0): n is c, t, a or g
tacatttcacatttaccagcaagtcagtaaaaaatagtgcttatttacatagtcaatataatttaatgttctaaaaataatatcttcgatctgcccaatatttaatgtatcatttgagatttttaaaaatgcanccgctccattatgtaaacattaagatatgcctatgtttctttaactatacagcctctttacaataaatttcttgatttttgtgcacaggatagtattgcaacctgctatttagcctttggtgccttagaattattataaatatttaacaatatgtacataatgtaaatactgccaagagatcagtaaggccaaatattttctctattcactttttattgctcttgctttctattgctactaaagcctcttttatccagctttgtaatagttccaacattgtagcgaa

SEQ ID NO: 19 - DNA, 539 bp, Homo sapiens
gggtctccaggaagatctcccagatgctcctgggtattattctttgctcctgcatctgcactgtcctctgtgtttggtgcttttttagcagacctcacttcacagtcacaactgtgctattcatgaataacaatacaaggctcaactggcagaataaagatctcaatttattttattcctttctcttctgctatctgtggtctgtgcctcctttcctattgtttctggtttcttctgggatgctgactgtctccctgggaaggcacatgaggacaatgaaggtctataccagaaactctcgtgaccccagcctggaggcccacattaaagccctcaagtctcttgtctcctttttctgcttctttgtgatatcatcctgtgttgccttcatctctgtgcccctactgattctgtggcgcgacaaaataggggtgatggtttgtgttgggataatggcagcttgtccctctgggcatgcagccatcctgatctcaggcaatgccaagttgaggagagctgtgatgaccattctgctctgg

SEQ ID NO: 20 - DNA, 453 bp, Homo sapiens
gtttacctagtattcatcaccctgcttgttttctctgtgttatgtcttggaaacccttccatgtcaatgtaggtagctgtatcttctttcagctgctatacagtagtccagtatgtgattgggccatgtttctttttctttttaaaaactattctattggacacaaacaagttaaatttgtttatactgaaaactcaggcgttttctgagaaagacttagcaaagaagattaagtcccttcttcatatcaaactctgtttagtaaagtagtaacatatagttgtgggttgctcttgtaaacaggctttactgactgtgaaacttcaactttgtaacatgtattttctactctgcacttgatcttagccaaaagggtgagaagcgattctaccctggatagtatatgctgtaattaagtatctccaagaaggtgtttattagccattctgagta

SEQ ID NO: 21 - DNA, 443 bp, Homo sapiens
  misc_feature (0)...(0): n is c, t, a or g
agattatggcctattgaacaaaatgtgaaactgggagtccacaaagacataaatggaaagatgaagtacctcctgacagagcaagaatggcactgaacaatgttatatggacaatggctattttattcaagactattacaatagggaaaagagactaggactcagtctgaactgaaatctgtcaaaacaaaggggggtggggctttaagagtgaaggtgaggaggagatcacacaccgtatgtgtttgctaactggctttacccaaaagaaaattaaactttctttgatctgtacaagttgatcaaanaaannnnnnnannnnnnnnanannnaactaaaacagggtagacaggccaggggaaaaaggcactcagggcacacagcattgcttcaaaatataattctctacaaacctagttgctaaaactacctgttgtaacct

SEQ ID NO: 22 - DNA, 298 bp, Homo sapiens
aggctgtgctggacctggcttcatttctgctccaggatggcaggctgtgtcttcttcatggctgcatgaccagcctggggtgggtgtgcccggggaaagtaggtgtacactgggagccgtgccatgtttcaggccctgtcctggctctgcctcgggtgcgggaccttggtcctccacactggctgggtggggctggatgggttgagattcacatgtgctccttacgaccacgggtccctgggtgcccgcagcagggcctccacccttcgctgtgtgcatattcgtgtgcttatgagtt

SEQ ID NO: 23 - DNA, 298 bp, Homo sapiens
  misc_feature (0)...(0): n is c, t, a or g
accctctccttgagtttctgtgaattaaaatatttgcaaatncanannnnnnnanannnnaaannnnnnnnnnnnnnnnnnnncnactgatgctgggagccaaatgctggtgctttgagagtcccggaggccccggggttcccgccccgctggtgtgtatatgtgtgtctgtgtgagtgtgtgtgtgagtacagatgtgagaaggtggtcacacacagatgggtaagcccactgatctacttgtagtcactcagtgtaatcattaggctatcttcaaggaatcattgtgcagtcaaaa

SEQ ID NO: 24 - DNA, 340 bp, Homo sapiens
  misc_feature (0)...(0): n is c, t, a or g
aaacagttgatggtgcactcgtagctgcaaaatgaaggacattaaatttggctgtgacattgagtggttacacagaagacctgcttctacaacatttggaaacattgtgaaacattactattcagttgctatttttccatctcaaaatattnttttttagttgctgctcacttatggccacagaacagtccctttttgagtaaagcagcaaggntgcttaatnacatgctatgtggttaacaagattcnactgccacntcaaggactttaaataatttcaagattttaaatgtatttatgaaatgaactcattacagcagctaatcaatgcaaactttgt

SEQ ID NO: 25 - DNA, 118 bp, Homo sapiens
atctccctcagtgcctggcaatgtttgtggttggttgagtgagttaacaggagaccatcttttggccttttttctacctctgttttctcttactatacttgcctacatctcatcttct

SEQ ID NO: 26 - DNA, 206 bp, Homo sapiens; identical to SEQ ID NO: 1

SEQ ID NO: 27 - DNA, 564 bp, Homo sapiens
  misc_feature (0)...(0): n is c, t, a or g
gatgactatctatgaacctaaggaggaaaagttaatttcttttgagggtttgcataatgttttaaaacaaatttatagaaatatagatgatggaaaaaagcaatagggtaaacctaaattanttaaaaataaataatacatnaggaaataaacagcatagaaaagaaacaaaaaagagattgttaccaaaaacnataagtttttttttttttgaaaattctaagaaggtggataaatttctggaattttcaatgagcaaaaaagtgaaaagatacaaatgaataaaaaatgaaaaggtagaaattaaaataggtctagtagagattaaaaataataaaagaatattattaaaaagtattggtggataaaataggcacatatctgaagataaaagccgaattgaccccctaaaaagcagaaaacttacaataacaatcattaatggctttgaatggctatgaaaaaataatatctctgccctcttcactactcccatgtaaaataattttacgggtagattttaccaacgtttcaagagagacatgattcccaaatattatgtaa

SEQ ID NO: 28 - DNA, 418 bp, Homo sapiens; identical to SEQ ID NO: 2

SEQ ID NO: 29 - DNA, 506 bp, Homo sapiens
  misc_feature (0)...(0): n is c, t, a or g
gtagagttctctaaagggtcttgatattagtgggacataattagttctaaactaaatactgctctggtcctgcctaacaaatcacaaaagcaagatccaaaagaatcaaactgtttccaagtcacttaactatagtccagaaaaaaagctcaagaatattcataggaatacaaaaatatccaatacccaaaaaggtaaaattcacaaagtctgccacaaagtctggcatccagttgagaactaccagacatacaaaaaagcagcagaaaaatataatctataataaagagaaaaatcaatcataaccacccagaactaacacagatattagaattagcagataaaatggaaagttattatagctatattctatatagttaaaaaactagaggaaagctcaaagatagtaagaagagacatgaaagataataaaaacccaaatcaaacnnnnnnaaatgaaaattatctgaggttaaaaaaatacactggatagaattaatggcaag

SEQ ID NO: 30 - DNA, 409 bp, Homo sapiens
agattaacattgacagttcgacaagagagactatcatcaggaacattcaggaacccactgaaacatgttttgaagaagctcagaaaatagtctatatgcatatggaaagggattcctaccccagatttctaaagtcagaaatgtaccaaaaacttttgaaaactatgcagtccaacaacagtttctgactacaactcaaaagtttaaatagaaaacagtatattgaaagtggtgggtttgatctttttatttagaaacccacaaaatcagaaacacagtacaaataaaacagaaatcaaactataagttgacttttagttcctaaaaagaaacatatttcaaaagcaatggaatctagaattcttataacatgaataacaaaatgtacagcaagcctatgtagttcaat

SEQ ID NO: 31 - DNA, 426 bp, Homo sapiens
acagcctatggaggctccagtcatgctgtgggatgagtccagcttccctgacatcccaggggctgtaagtgccaacatgactgtgaagggccagagtgaagaccctggctccctcctttccttgttccggcggctgagtgaccagcggagtaaggagcgctccctactgcatggggacttccacgcgttctccgctgggcctggactcttctcctatatccgccactgggaccagaatgagcgttttctggtagtgcttaactttggggatgtgggcctctcggctggactgcaggcctccgacctgcctgccagcgccagcctgccagccaaggctgacctcctgctcagcacccagccaggccgtgaggagggctcccctcctgagctgggacgcctgaaactggagcctcacgaagggctgct

SEQ ID NO: 32 - DNA, 547 bp, Homo sapiens
gcaaaggggtttcctcgatttggagctttttttttcttccaccgtcatttctaactcttaaaaccaactcagttccatcatggtgatgttcaagaagatcaagtcttttgaggtggtctttaacgaccctgaaaaggtgtacggcagtggcgagaaggtggctggccgggtgatagtggaggtgtgtgaagttactcgtgtcaaagccgttaggatcctggcttgcggagtggctaaagtgctttggatgcagggatcccagcagtgcaaacagacttcggagtacctgcgctatgaagacacgcttcttctggaagaccagccaacaggtgagaatgagatggtgatcatgagacctggaaacaaatatgagtacaagttcggctttgagcttcctcaggggcctctgggaacatccttcaaaggaaaatatgggtgtgtagactactgggtgaaggcttttcttgaccgcccgagccagccaactcaagagacaaagaaaaactttgaagtagtggatctggtggatgtcaatacccctgattta

SEQ ID NO: 33 - DNA, 543 bp, Homo sapiens
gtgttctcctactgcaaatattttcatatgggaggatggttttctcttcatgtaagtccttggaattgattctaaggtgatgttcttagcactttaattcctgtcaaattttttgttctccccttctgccatcttaaatgtaagctgaaactggtctactgtgtctctagggttaagccaaaagacaaaaaaaattttactacttttgagattgccccaatgtacagaattatataattctaacgcttaaatcatgtgaaagggttgctgctgtcagccttgcccactgtgacttcaaacccaaggaggaactcttgatcaagatgcccaaccctgtgatcagaacctccaaatactgccatgagaaactagagggcaggtgttcataaaagccctttgaacccccttcctgccctgtgttaggagatagggatattggcccctcactgcagctgccagcacttggtcagtcactctcagccatagcactttgttcactgtcctgtgtcagagcactgagctccacccttttctgagagttat

SEQ ID NO: 34 - DNA, 429 bp, Homo sapiens
atcaggactctgacgtctctttggtcttgttgatttacctctgggcatatcccttccccagatctgctcctcccctttcacaggtgggatcggcactcagggggtctggaaagaaggtcataagggagcatgataggatttggggcagagggacaggctcctctggggaaaccccccagagctctttaccaaggatgaaagaggagccaggccttgggctcctgatgaccagaaaggggccaccggggtctaatggtgacagtccaaaccactccactggcctcctggcagaagccgagtgtgctggggtctccgaagagggtccctcctttttgggggaaggtcagcccagcccctccaaaggtctgatgtctccactttcacccgcaggccttaccgctctgtttatagtgacccaccctagatctt

SEQ ID NO: 35 - DNA, 401 bp, Homo sapiens
cctaccaggccaccattgatggagtcagatttttggggacatcaggacagaacgtgagtgacattttccgatacagcagcatggaggatcacttggagatcctggagtggaccctgcgggtccgtcacatcagccccacagccccggacactctaggttgttaccccttctacaaaactgacccgttcatcttcccagagtgcccgcatgtctacttttgtggcaacacccccagctttggctccaaaatcatccgaggtcctgaggaccagacagtgctgttggtgactgtccctgacttcagtgccacgcagaccgcctgccttgtgaacctgcgcagcctggcctgccagcccatcagcttctcgggcttcggggcagaggacgatgacctgggaggc

SEQ ID NO: 36 - DNA, 484 bp, Homo sapiens
acatcgtccacttccagtatgaggtcaccgaggtgaaggtctcttcttgggatgcagtcctgtccagccagagcctgtttgtagaaatcccagatggattattagctgatgggagcaaagaaggattgttagcactgctagagtttgctgaagagaagatgaaagtgaactatgtcttcatctgcttcaggaagggccgagaagacagagctccactcctgaagaccttcagcttcttgggctttgagattgtacgtccaggccatccctgtgtcccctctcggccagatgtgatgttcatggtttatcccctggaccagaacttgtccgatgaggactaatagtcatagaggatgctttacccaagagccacagtgggggaagaggggaagttaggcagccctgggacagacgagagggctcctcgctgtctagggaaggacactgaggggctcagggtgagggttgcctattgtgttctcgg

SEQ ID NO: 37 - DNA, 491 bp, Homo sapiens
tgtcctgcccaagtgggctgcagactgagtgctgcccttgtagcttccccagaccccaactcactgcagttcatctgaacaacctgagctcctgggccggggtggaaggagggggataaacctaaggccctgatccaaagcagcctgttgagctggttctccagggctgcagtctctccaggtgtacagctgtccctgccctgtcctgtccttgcacagtctcctatgtctgagccccagtgccttctgttcgggccctcctttggtgggaaaggcagagccctgacccttgaatggttgtccttgactctgtgctgctgccttctgcagagaggcacctaagctgtttaaagagcccagtgattgtggctgctcctcctagaggtgggagggggcaagaggcctccttggtcagtgtccatgctttctgggcagggacttggttttttgttccaacagtggccttctccgggcttcatagttctttgtaa

SEQ ID NO: 38 - DNA, 498 bp, Homo sapiens
gacaggtgaacatttccgcctggtctatgacaccaagggccgttttgctgttcaccgcatcacagtggaagaggcaaagtacaagttgtgcaaagtgaggaagattactgtgggagtgaagggaatccctcacctggtgactcatgatgctcgaaccatccgctacccagatcctgtcatcaaggtgaacgatactgtgcagattgatttagggactggcaagataatcaactttatcaaatttgatacaggcaatttgtgtatggtgattggtggagccaacctcggtcgtgttggtgtgatcaccaacagggaaagacatcctggttcttttgatgtggtgcatgtgaaggatgccaatggcaacagctttgccacgaggctttccaacatttttgtcattggcaatggcaataaaccttggatttccctgcccaggggaaagggcattcgacttactgttgctgaagagagagataagaggctggccaccaaaca

SEQ ID NO: 39 - DNA, 423 bp, Homo sapiens
aaactgtagtttgcctccaagacaccattgtctccctttaatcttctcttttgtatacatttgttacccatggtgttctttgttccttttcataagctaataccactgtagggattttgttttgaacgcatattgacagcacgctttacttagtagccggttcccatttgccatacaatgtaggttctgcttaatgtaacttcttttttgcttaagcatttgcatgactattagtgcttcaaagtcaatttttaaaaatgcacaagttataaatacagaagaaagagcaacccaccaaacctaacaaggacccccgaacactttcatactaagactgtaagtagatctcagttctgcgtttattgtaagttgataaaaacatctggaagaaaatgactaaaactgtttgcatctttgtatgta

SEQ ID NO: 40 - DNA, 391 bp, Homo sapiens
  misc_feature (0)...(0): n is c, t, a or g
acagattgttctcaagagggccatcagaaggaagccaaagagttcacagcctcagcaccaacaactcaacatggtcatcatgttttctatatggtttttccagctagcagtactcccttccatacctgtgactgggcagtgcttttctctctcccatgtctagcctccaaaagttaagtgaaaattagtcaactgcacgtggaagnnccccaccactttggggatctctttatttcttttcagccagggacctgtccactccctttgaattaatatgggaagaaattaatacaggatgaactggagagaagggttgagtgtggcatactttctgaaacctggagctgggaattgcggagaagggaaggtctagactagttacatcacatag

SEQ ID NO: 41 - DNA, 522 bp, Homo sapiens; identical to SEQ ID NO: 3

SEQ ID NO: 42 - DNA, 368 bp, Homo sapiens
ctggtcacagtggtagtcgctggccccaggaccccctcctgattttggctaggcatcgtggaaccagctccagcccctgaagaaacgatagatgtgcaggttgtgcggaagaggctgagtggaaaatggtgtgagccccaccgctgtgcatcgaatgagggaagtggcagcagagaggccagagctgccccctctctgtctcttcaatggacccttcacaagtgtttctcctgcccttggggctgtcttccttctcctgaaatccagagactttcttgctcatcccttctccctttcacttctgttctctgctgcagaaagcagacttgcatatccctgatgagcagctcggctacttttgtaaactt

SEQ ID NO: 43 - DNA, 472 bp, Homo sapiens
tcaattgacttctgttccttgcttttagttttgatagaagggaagacctgcagtgcacggtttcttccaggctgaggtacctggatcttgggttcttcactgcagggacccagacaagtggatctgcttgccagagtcctttttgcccctccctgccacctccccgtgtttccaagtcagctttcctgcaagaagaaatcctggttaaaaaagtcttttgtattgggtcaggagttgaatttggggtgggaggatggatgcaactgaagcagagtgtgggtgcccagatgtgcgctattagatgtttctctgataatgtccccaatcataccagggagactggcattgacgagaactcaggtggaggcttgagaaggccgaaagggcccctgacctgcctggcttccttagcttgcccctcagctttgcaaagagccaccctaggccccagctgaccgcatgggtgtgagcc

SEQ ID NO: 44 - DNA, 258 bp, Homo sapiens
aagcgtaaagaggatgtgtggcattttcacttttggcttgtaaagtacagacttttttttttttttaaacaaaaaaagcattgtaacttatgaacctttacatccagataggttaccagtaacggaacatatccagtactcctggttcctaggtgagcaggtgatgccccagggacctttgtagccacttcactttttttcttttctctgccttggtatagcatatgtgttttgtaagtttatgcatacagtaatttt

SEQ ID NO: 45 - DNA, 534 bp, Homo sapiens
ggcagctggaatttaaggagggacaagaatcaatggataagcgtgggtggaggaagatccaaacagaaaagtgcaaagttattccccatcttccaagggttgaattctggaggaagaagacacattcctagttccccgtgaacttcctttgacttattgtccccactaaaacaaaacaaaaaacttttaatgccttccacattaattagattttcttgcagtttttttatggcatttttttaaagatgccctaagtgttgaagaagagtttgcaaatgcaacaaaaatatttaattaccggttgttaaaactggtttagcacaatttatattttccctctcttgcctttcttatttgcaataaaaggtattgagccattttttaaatgacatttttgataaattatgtttgtactagttgatgaaggagttttttttaacctgtttatataattttgcagcagaagccaaattttttgtatattaaagcaccaaattcatgtacagcatgcatcacggatcaatagactgtact

SEQ ID NO: 46 - DNA, 438 bp, Homo sapiens
gcccctggagtcgcggagaaagggccgtaaccggaggacccacgcccctgagcctcgcgctgagcgggggccgcgcagcgcaacgcactggtgaccagactgtccccacgccgggaaccaagcaggagacgacaggcgagagaggagccagacagaccctgaaaagaaggacgggttggggccgggcacattgggggtcaccggccgatggagacaccaaccgacaggccctggctgagggcagctgcgcgggcttatttattaacaggataacccttgaatgtagcagccccgggagggcggcacaggtcgggcgcaggattcagccggagggaagggacggggaagccgagctccagagcaacgaccagggccgaggaggtgcctggagtgcccaccctgggagacagaccccacctccttgggtagtgagcagtg

SEQ ID NO: 47 - DNA, 472 bp, Homo sapiens
attaccgactgtatgcctacacggagtcggagctgcagattgccctcattgccctcttctctgagatgctctatcggttccccaacatggtggtggcgcaggtgacccgggagagtgtgcagcaggcaatcgccagtggcatcacagcccagcagataatccatttcctaaggacaagagcccacccagtgatgctcaaacagacacctgtgctgccccccaccatcaccgaccagatccggctctgggagctggaaagggacagactccggttcactgagggtgtcctgtataaccagttcctgtcgcaagtggactttgagctgctgctggcccacgcgcgggagctgggcgtgctcgtgttcgagaactcggccaagcggctcatggtggtgaccccggccgggcacagcgacgtcaagcgcttttggaagcggcagaaacatagctcctgagagcgcgggacttggac

SEQ ID NO: 48 - DNA, 546 bp, Homo sapiens
cacttagtgtgaaagacttgccttgtgtattctttatgtaattacaaatcactgtcaattttatgggaagctcatagtattttaatattttattaacatggaactcttgtttttttaatctttagaacttaaattctacaagaattttaaatattttctgtatataattatgacattgtcacacagaaattacacattttatgtgccagaagccttaaacatctttctgtgaaaatgctgatatattgtgacagttatttcacatttgatatgtagagaggaataggggttagtttatgtttatattgaaaaactttaaagactatttggaagttccagaaattctggttttaattcaagtaaaatgataaaatagtcattatatagttcagatgctaatattctaagtaataatatatatttacattgaagctaaaactgttaagcaaaacaatgcccatttgtcggcttacagctcttccggagtctagagcctgttggtgttctgtccctactttaagaatttaattgctcacttattctgaa

SEQ ID NO: 49 - DNA, 529 bp, Homo sapiens
gcgcttcttccaggacaagcgcccggtgcccacgtagcccctgccatggaaggaagaacgggacaaaggaggggcagcagggtgtgtgcatatgagacttgggggtccctccccaattttagtttcctgccaaaacgggagtgtgcagtcagggcctgcggtctggccccatgagtctccttccgtcctcagcgggcagggaacacctctggcttgtagaagggacggctcagtggctgcaccgacggtcctggaaatctcacatggtgggcactgcagcgttggaacgtgagcctcggatttcctggcccctctactgtaaatgtgccttagcctaagcctcccatcctgtgttagcgttgcctggtgcggggcagggcctaacaaggaaacctgggccctccaagccaggttgaggtctggtaacagaatgccaggaagggggcctggaagaccacctgccccggcccctctcctgcaggggccccacacaggcatgagggatggcccggccaaagtctaggcagaa

SEQ ID NO: 50 - DNA, 501 bp, Homo sapiens
tggggacctgtcaggctttgtcatttcccagtttgttggtggtgcctttagtggttccctaatttgggaacactgatggggccttggacagggctttctctcaggtaggagaaatgggcccatgatctcctcacagtcgcccccagtccttggccctgcttccctgtgtctcatgcactggcacatatggtcaccttggagggcagacctaggagcccctctgaccactgaatccgtctccacaccccttctgccaagggaagccccttcaggaaggaccccccaaagctgaggggctgaatgtagccttttcaacagagaaggctcccacttgagagcagcctctacctgaccccctggaccacagagagccactctgaccctcagccccctcgcttcttcagctaaaactccaaaggtttggtttcagatggggtttgttttgttctgtttggttttggttttgtttggggtgggtgggtcattgcggtcttagattat

SEQ ID NO: 51 - DNA, 546 bp, Homo sapiens
taggcatgattccaactggctgcatataggagtcagttagaattgtttctttctctccccgtttctctccccatcttggctgctgtcctgcctctgaccagtggccgccccccgcgttgttgaatgtccagaaattgctaagaacagtgccttttacaaatgcagtttatccctggttctgaggagcaagtgcagggtggaggtggcacctgcatcacctcctcctcttgcagtggaaactttgtgcaaagaatagatagttctgcctcttttttttttttttcctgtgtgtgtggcctttgcatcatttatcttgtggaaaagaagattcaggccctgagaggtctcagctcttggaggagggctaaggctttagcattgtgaagcgctgcacccccaccaaccttaccctcaccggggaaccctcactagcaggactggtggtggagtctcacctggggcctagagtggaagtgggggtgggttaacctcacacaagcacagatcccagactttgccagaggcaaacagggaattccgccgata

SEQ ID NO: 52 - DNA, 508 bp, Homo sapiens
taatatctttgggtcttactatttttacccataaaagtgaccaggtagaccctttttaattacattcactacttctaccacttgtgtatctctagccaatgtgcttgcaagtgtacagatctgtgtagaggaatgtgtgtatatttacctcttcgtttgctcaaacatgagtgggtatttttttgtttgttttttttgttgttgttgtttttgaggcgcgtctcaccctgttgcccaggctggagtgcaatggcgcgttctctgctcactacagcacccgcttcccaggttgaagtgattctcttgcctcagcctcccgagtagctgggattacaggtgcccaccaccgcgcccagctaattttttaatttttagtagagacagggttttaccatgttggccaggctggtcttgaactcctgaccctcaagtgatctgcccaccttggcctccctaagtgctgggattataggcgtgagccaccatgctcagccattaaggtattttg

SEQ ID NO: 53 - DNA, 493 bp, Homo sapiens; identical to SEQ ID NO: 4

SEQ ID NO: 54 - DNA, 286 bp, Homo sapiens
aacttaagatggacacagctgactggacccccatcctgcctcacccatgggtgctgcaccccagacccatcctgccacttctatgtctctggaccacaggatggtggtggcattgcaggttggcaagtgggctgatggggtccgccctcctcactgctgagctcctcacctggacagtctcctggacaaggagtttccagctgctggctggagtctcaggccaaattgcagagggtcctccagggtcctgaagagcactggactaagagtctagtggttccagggc

SEQ ID NO: 55 - DNA, 410 bp, Homo sapiens
gcaaacatccggaagtatcccaccaagaaacaacagctccattttatttccagttacttgcctgcattccaaaatgactttgaaaacctcagtactgaagaaaaatccattataaaagaagaaatgttgcttgaagttaataggtttgcccttgcatctcatttcctctggggactgtggtccattgtacaagccaagatttcatctattgaatttgggtacatggactacgcccaagcaaggtttgatgcctatttccaccagaagaggaagcttggggtgtgactgtggggaggactccatccacctcatcactggactgcatggggaggcagcagagcggggtcccctctgtgcttcgactactgctcctgtggcaggaggctttgggtggctcactactgaacaca

SEQ ID NO: 56 - DNA, 549 bp, Homo sapiens
aggttatgccatatcagagggaaattgagaaaaaaggtttggataaatacatcagacattatattggttggtctacgggactatcaggataacaaagctgatgtaattttaaagtacaatgcagatgaagctagaagcctgaaggcatatggcgagcttccagaacatgctaaaatcaatgaaacagacacatttggtcctggagatgatgatgaaatccagtttgacgatattggagatgatgatgaagacattgatgatatctaaattgaaccaagtgtttttacatgacaagttctctgaggatggttctacagttgggattttggccatcatcaaccaagaagagaaattcatttagtgtgtagtttctgaaagcaaactgatttattttcattgttttaaagtatttatttctttaaaagctgaggacactgaattaccttaagttaaatgttaatactttattgttttgatgtaatggaacttaaggataaaagaccataatatttgctgttaaaataaataaacgagtgcctttcctactgt

SEQ ID NO: 57 - DNA, 478 bp, Homo sapiens
cctttcctactgtgataacgtcaagtaattggatattttgaatacatttctgcctgataatcatgctgagttctaataagccctacttccacctaatctgtttacagtcttttggtatgtttcagttacttagatggtctcataaggtttctgatacaatttgaagacagaaatctgcatttagaatcagaaaacatggacatatttttcatatttatctagtcatatgtaattttatgctaacattgatagtttataaatccttttcatcctttgtgcctcggttattaaggaaaaaaaaatgtccaacatacagtttttaaagtgtggcagttttgagtagtaacttagaatgtataagattaagagttaaagaaaccgaacaataagtggcaaccaattatcttaacattggaaatactggggtgccattttgttttcaaaagttattcattgtaatccactgttttggctttca

SEQ ID NO: 58 - DNA, 446 bp, Homo sapiens
aatcttctatggctctctttttaatatatatatatatatatatatatatatatatatatatatatatatatctatctggtagatcacatgtagatgtacagtgtgtatattaagctgaatttcaaccaactttattactaagaccagcctagcagggcattcatctttgatgttcttccttttcacatttcagaatcggcaatgcctggcccactcctgagagctctagttttctagttttccatttccagattgcgccagcattacagtaactaactctttctaaccaaccgtgatgccacgtaacttaccctatggacaaaagcaggaatgactaacacatcctaggagggaaagtccagtgtacctgtcatcacggacgcactgtggtcacagactggaatacgaaatactacagccctgctcccaggtgtgcatcttactgg

SEQ ID NO: 59 - DNA, 512 bp, Homo sapiens
caccagcaaggacggccaggacggtgctcccggcgagcctgggcctcccggagatcctgggcttccaggtgccattggggcccaggggacaccggggatctgcgacacctcagcctgccaaggagccgtgttaggaggggtcggggagaaatcaggctctcgaagctcataaaattcaacgtgaggaagcaagtgacaaggacgcccgaagcacagtggacggtcatgaaggagcgggggtgtggcaggcgggtgacgtccaggagagggagcgcccctggctgcccctcggccgccgactggacgcgtgggccttgccagcgagcaccctcattgggctgtcgcctgacagcatacctcaaaaggccctagctaataaacctgtaagcccagcatttgagagaaggtagggtgtgtatatataaaaggttgtgtacaactccacgaggtgaaaaatattcagtaacttgtttgcatagcatttgtgtaaagactatgatctcatcccaata

SEQ ID NO: 60 - DNA, 504 bp, Homo sapiens
ccggctatgggctcgagccgagttccttcaacatgcactgcgcgccctttgagcagaacctctccggggtgtgtcccggcgactccgccaaggcggcgggcgccaaggagcagagggactcggacttggcggccgagagtaacttccggatctacccctggatgcgaagctcaggaactgaccgcaaacgaggccgccagacctacacccgctaccagaccctggagctggagaaagaatttcactacaatcgctacctgacgcggcggcggcgcatcgagatcgcgcacacgctctgcctcacggaaagacagatcaagatttggtttcagaaccggcgcatgaagtggaaaaaggagaacaagaccgcgggcccggggaccaccggccaagacagggctgaagcagaggaggaagaggaagagtgagggatggagaaagggcagaggaagagacatgagaaagggagaggaagagaagcccagctctgggaactgaatcagg

SEQ ID NO: 61 - DNA, 339 bp, Homo sapiens
agcagcttattgtttctctgaaagtgtgtgtagttttactttcctaaggaattaccaagaatatcctttaaaatttaaaaggatggcaagttgcatcagaaagctttattttgagatgtaaaaagattcccaaacgtggttacattagccattcatgtatgtcagaagtgcagaattggggcacttaatggtcaccttgtaacagttttgtgtaactcccagtgatgctgtacacatatttgaagggtctttctcaaagaaatattaagcatgttttgttgctcagtgtttttgtgaattgcttggttgtaattaaattctgagcctgatattgatatg

SEQ ID NO: 62 - DNA, 410 bp, Homo sapiens
gcccactgcctaaatgatgcccggccagcaggacctggcctgcagatcccagtgagtcatgagcctcagccccctccagcccactggggctctcacctccacatgtgggtagaagctttcctgccccctcttcctctagtagccctcagtgtcgaaggtgagcttgtaggtgcctgccttcatctggtccaggacagtgaccatctgggtctgtgtagctggggagagaatgaggctgcagagatggggaccagaagccccccaccccagctttcctgggtctgcatcccagtgggcctcagacactgccctgccacctgtcagacttgggtgagcagacacagtgaggctgttaggtcctgcagttccagagcagtctagggacaccactgccctgtctttaggaaatc

SEQ ID NO: 63 - DNA, 525 bp, Homo sapiens
ctggctgggcgtgtaggacggtgagagcacttctgtcttaaaggttttttctgattgaagctttaatggagcgttatttatttatcgaggcctctttggtgagcctggggaatcagcaaaaggggaggaggggtgtggggttgataccccaactccctctacccttgagcaagggcaggggtccctgagctgttcttctgccccatactgaaggaactgaggcctgggtgatttatttattgggaaagtgagggagggagacagactgactgacagccatgggtggtcagatggtggggtgggccctctccagggggccagttcagggcccagctgccccccaggatggatatgagatgggagaggtgagtgggggaccttcactgatgtgggcaggaggggtggtgaaggcctcccccagcccagaccctgtggtccctcctgcagtgtctgaagcgcctgcctccccactgctctgccccaccctccaatctgcactttgatttgcttcctaacagctctgtt

SEQ ID NO: 64 - DNA, 410 bp, Homo sapiens
taagcagacccggcattggcaatgtagctgtaattttctgacaaaatttaagacaaaattgtcaacttgaaactaaaacatgccaaggttttgatatacttgtcttaagatattaatgaaacaattttgaacactgataggaaggtccacatccacaaagtttctcttgagttttgttatgtgttttgctgtgtttgattttcagtgattgtctggtatatttacagtcctcaaacatggttatttctgtcagtgacttaacattcggttttaccagccagcagtattcttcagtaaataaagaatggaattgctgaatgtaatcattgaacctcgagtcactgtaaaagttcagtaattgcttattgtattagttttagatgctggcaccgcatgtgctctgtttattc

SEQ ID NO: 65 - DNA, 518 bp, Homo sapiens
agaagtgccttcttggttggaaaatatggcttatgaacaccactacaagggtggcagtcgtggacgatctaaaagtaatagattcagtggaggatttggtgccagagactatcgacaaagtagtggttccagcagttccggctttggtgctagtcgcggaagcagcagccgcagtggtggaggtggttacggcgacagcagaggatttggtggaggtggctatggaggcttctacaatagtgatggatatggaggaaattataactcccagggggttgactggtggggcaactgaatctgctttgcagcaaagtcacccttacaaagaagctaatatggaaaccacatgtaacttagccagactatattgtgtagcttcaagaacttgcagtacattaccagctgtgattctcctgataattcaagggagctcaaagtcacaagaagaaaaatgaaaggaaaaaacagcagccctattcagaaattggtttgaagatgtaattgctctagtttggatt

SEQ ID NO: 66 - DNA, 543 bp, Homo sapiens
attatataactctttgagcctttattggtaaattctggtatacattgaattcattataatttgggtgactagaacaacttgaagattgtagcaataagctggactagtgtcctaaaaatggctaactgatgaattagaagccatctgacagacggccactagtgacagtttcttttgtgttcctatggaaacattttatactgtacatgctatgctgaagacattcaaaacgtgatgttttgaatgtggataaaactgtgtaaaccacataattttgtacatccaaggatgaggtgtgacctttaagaaaaatgaaaacttttgtaaattattgatgattttgtaattcttatgactaaattttcttttaagcatttgtatattaaaatagcatactgtgtatgttttatatcaaatgccttcatgaatctttcatacatatatatatttgtaacatgtaaagtatgtgagtagtcttatgtaaagtatgtttttacattatgcaaataaaacccaatacttttgtccaatgtggttggtcaa

SEQ ID NO: 67 - DNA, 461 bp, Homo sapiens
acttcttctctcatgaatcatccagtcattccaatggcaaataagttctcacctacccttgagctgcaaggtgaattctctccattacagtcatctttgccttgtgacattcatctggttaatttgagaacaatacagtcaaaggtgggcaatgggcactccaatgaggcagccttgatcctccacagaaaagggtttgattgtcggttctctagcaaaggcacagggctgttttgttctactactcagggaaagatattggtacagaaacttttaaacaagtttattgtcgaaagtctcacaccttcatcactatccttgatgcattcacctcccggcactcagaatataagtgagatcaacttgagtccaatggaaatcagcacattccgaatccagttgaggtgaacctgactttcacatttggattgagaatcattggcttttatacctttcttggt

SEQ ID NO: 68 - DNA, 383 bp, Homo sapiens
agatccgagtgcactcgcgaggcaacctctgggccaccggtcacttcatgggcaagaagagtctggagccttccagcccatcccattggggacagctccccacacctcccctgagggaccagcgactgcagctgagtcatgatctgctcggaatcctcctgctaaagaaggctctgggcgtgagcctcagccgccccgcaccccaaatccagtacaggaggctgctggtacaaatactgcagaaatgacaccaataataggggcagacacaacagcgtggcttagattgtgcccacccagggaaggtgctgaatgggaccctgttgatggccccatctggatgtaaatcctgagctcaaatctctgttactccattactgtga

SEQ ID NO: 69 - DNA, 520 bp, Homo sapiens
cagcccctgaagaaaattcacgtgaaatgacagaaacgcagatgatgatacattccaagtcttcaaatggaaagtgaaatggattgtattttggtttatagtgacgtaaactgtatgacaaactttgcaggacttcccttataaagcaaaataattgttcagcttccaattagtattcttttatatttctttcattgggcgctttcccatctccaactcggaagtaagcccaagagaacaacataaagcaaacaacataaagcacaataaaaatgcaaataaatattttcatttttatttgtaaacgaatacaccaaaaggaggcgctcttaataactcccaatgtaaaaagttttgttttaataaaaaattaattattattcttgccaacaaatggctagaaaggactgaatagattatatattgccagatgttaatactgtaacatactttttaaataacatatttcttaaatccaaatttctctcaatgttagatttaattccctcaataacaccaa

SEQ ID NO: 70 - DNA, 400 bp, Homo sapiens
caattcctattcattcttagcactttgacatgtcttggggaaaagctttacattttaatttaaaagaaagatcaattatatccatgcttaacaggatcagcaggagctttataaatgactttacagagactaataagggattgatctttctttttttgttatcgaggcttttgaaatgtggaacttgtgtgttctgctttatatgttatattcaatatcttttcagatgcagtctatattttatgctgagttttaaaaatgaaatactttatgcaaacaggcaaaattggtaccaaagggaaacattaaccatgaggaagagcatttttctaaggagaacaggtgacaatatacacatgtcgcgtaatcgtaaaatgagcatcttagtctttaaaacaca

SEQ ID NO: 71 - DNA, 481 bp, Homo sapiens
gccgtcacccgaagtcagaaacgtggcatctcatcggaagaggaggaaggagaggtagacagtgaagtagagctgacatcaagccagaggtggcctcagagcctgaacatgcgccagtcactatctaccttcagctcagagaatccatcagatggggaggaaggcacagctagtgaaccttcccccagtggcacacctgaagttggcagcaccaacactgatgagcggccagatgagcggtctgatgacatgtgctcccagggctcagaaatcccactggacccacctccttcagaggtcatccctggccctgaacccagctccctgcccattccacaccaggaacttctcagagagcggggccctcccaattctgaggactcagactgtgacagcactgaattggacaactccaacagcgttgatgccttgcggcccccagcttccctccctccatgaaagccactcgtattccttgtac

SEQ ID NO: 72 - DNA, 504 bp, Homo sapiens; identical to SEQ ID NO: 5

SEQ ID NO: 73 - DNA, 418 bp, Homo sapiens
ggaactctaaaccttgtgatgactactaacaaatgtaaaattatgagtgattaagaaaacattgctttgtggttatcactttaagttttgacacctagattatagtcttagtaatagcatccactggaaaaggtgaaaatgttttattcagcatttaacttacatttgtactttagagtatttttgtataaaatccatagatttattttacatttagagtatttacactatgataaagttgtaaataattttctaagacagtttttatatagtctacagttgtcctgatttcttattgaatttgttagactagttctcttgtcttgtgatctgtgtacaattttagtcactaagactttcctccaagaactaagccaacttgatgtgaaaagcacggctgtatataatggtgatgtca

SEQ ID NO: 74 - DNA, 448 bp, Homo sapiens
atctattttattatggtttcccttgtatctatttgtggtgaatgtgttttttaaatggaactatctccaaatttttctaagactactatgaacagttttcttttaaaattttgagattaagaatgccaggaatattgtcatcctttgagctgctgactgccaataacattcttcgatctctgggatttatgctcatgaactaaatttaagcttaagccataaaatagattagattgttttttaaaaatggatagctcattaagaagtgcagcaggttaagaattttttcctaaagactgtatatttgaggggtttcagaattttgcattgcagtcatagaagagatttatttcctttttagaggggaaatgaggtaaataagtaaaaaagtatgcttgttaattttattcaagaatgccagtagaaaattcataacgtgtatctttaa

SEQ ID NO: 75 - DNA, 275 bp, Homo sapiens
gaaatactcagcttaggcatttttactttaacccctaaattgattttgtaaatgccacaaatgcatagaattgttaccaacctccaaagggctctttaaaatcatatttttttattcatttgaggatgtcttataaagactgaaggcaaaggtcagaatgcttacgggtgttatttttataagttgttgaattccttaatttagaaaagctcattattttttgcacactcacaatattctctctcagaaatcaatggcatttgaaccaccaaaaa

SEQ ID NO: 76 - DNA, 447 bp, Homo sapiens
ccagctgttgctggtttgtcatgcctccggcttctacccaaagcctgtttgggtgacatggatgcggaatgaacaggagcaactgggcactaaacatggtgatattcttcctaatgctgatgggacatggtatcttcaggtgatcctggaggtggcatctgaggagcctgctggcctgtcttgtcgagtgagacacagcagtctaggaggccaggacatcatcctctactggggacaccactcttccatgaattggattgccttggtagtgatagtgcccttggtgattctaatagtccttgtgttatggtttaagaagcactgctcatatcaggacatcctgtgagactcttccccctgactcccccattgtgttaagaacccagcaacccaggagcctagtacaatatagtgatgccatcccgtcgactctccatttaaattgtt

SEQ ID NO: 77 - DNA, 371 bp, Homo sapiens
gatggtaaaggctgttcaaccccaagagatgagtcagatgaagccccatgtgtatgatctgccagtagaaggcaatgagcccccagcctcttttcataaagacacaaacgcacttccccctactgttttcaaggataatccaatgtctacacctaaggactcaaatccagaagcatgaagcaacagctaagcaagaactaatggttaaattatcaacttggaaaacttggaaaatctggatgccagagaaatatactatctcaccagtatttgctctcgactcaagaaggttaacattttctgattcatgttagactttgaagagactaaagaaaattttcaagaggaacatatgcctgagaacctttgca

SEQ ID NO: 78 - DNA, 501 bp, Homo sapiens
gctgacatcctgcgagactacaaagttattatggctgaaaacattcctgaaaaccctctgaagtacctatatcctgacattcccaaagacaaagccttcggtaaacactacagctctcagccttgcgaagtttcaagaccaacagaaaggggtgacaaaggttatgttccttctgtttttatccccatctcaacaatccgaagtgattcaacagagccacattctccatcagaccttcttcccatgtctccaagtgtgtatgcggtgttgagagaaaacctgagtcccacaacaattgaaactgcaatgaagtctccttattctgctgaatgacaggataaactctgacgcaccaagaaaggaagcaaatgaaaaagtttaaagactgttctttgcccaataaccacattttatttcttcagctttgtaaataccaggttctaggaaatgtttgacatctgaagctctcttcacactcccgtggcactcctcaattgggag

SEQ ID NO: 79 - DNA, 454 bp, Homo sapiens; identical to SEQ ID NO: 6

SEQ ID NO: 80 - DNA, 459 bp, Homo sapiens
tgagcctggggttctggtgttagaatatttttaagtaggctttactgagagaaactaaatattggcatacgttatcagcaacttcccctgttcaatagtatgggaaaaataagatgactgggaaaaagacacacccacaccgtagaacatatattaatctactggcgaatgggaaaggagaccattttcttagaaagcaaataaacttgatttttttaaatctaaaatttacattaatgagtgcaaaataacacataaaatgaaaattcacacatcacatttttctggaaaacagacggattttacttctggagacatggcatacggttactgacttatgagctaccaaaactaaattctttctctgctattaactggctagaagacattcatctatttttcaaatgttctttcaaaacatttttataagtaatgtttgtatctatttcatgctttact

SEQ ID NO: 81 - DNA, 482 bp, Homo sapiens
tcttaaatcctactatctcctggcctggacctcagaaggagctttttgcctatctataatttttcactgccaatttttgatatcctctctcctagagttactgttaaaaggttggttcgtaaagtccacaccccgatgctcagaagtgtcttgccagcaacattcctgctagcatacaggagtgatttcctaaaccagtttcattctagtctgaatagggacaaacaaatcttgaggaagcccaagtgcgtacctttatttttgcccccaccaccctctttctgtacttcaatttttgtttgttttttgtttttttgtccctgtcataaaatattttggtgcttcaaaacttgtaccttcattgtacatccttttcttttctccccttgggtcttattataaaagaagacaatgtacgttgtaattaccaaaaagaatagggaaaaacaagaatttcatgactctacctgtggtctatcttt

SEQ ID NO: 82 - DNA, 549 bp, Homo sapiens
tgttgggaattggtactggctagaaatttctgttgagtatttattaccccatggtaataatggtaaaccacagtttagaaagattttttttgacagccacagcatgttccgaagagatgattggaagatggaagtggagggttaaataatgaaatgcagctaacatttcggaaagtttctaaaagttgtacaacatgccctacagctactctttaaatctccaaatcaaatgagtttcaggtggagcctctgggaggtgatgaggtcatgagagtggagcctcatgaatgggatgagcactcctacaaaaaggattccagagagctcgcttgctccttccacagtgtgaggacacagagggaaggctctgtctatgaatgagaaagtgggtccccaccagacattgaatctgccgcatcttgatactggacttccagtctccagaactgtgggcaataaatgtctgttgtttattacctgtccagtatctttggtattttgctatagcaacccaaatggactaagaaaacaccagaggccatacctaat

SEQ ID NO: 83 - DNA, 405 bp, Homo sapiens
ttgccttgtaattcgacagctctacagaaacaaagataatgaaaattacccaaatgtgaaaaaggctctcatcaacatacttttagtgaccacgggctacatcatatgctttgttccttaccacattgtccgaatcccgtataccctcagccagacagaagtcataactgattgctcaaccaggatttcactcttcaaagccaaagaggctacactgctcctggctgtgtcgaacctgtgctttgatcctatcctgtactatcacctctcaaaagcattccgctcaaaggtcactgagacttttgcctcacctaaagagaccaaggctcagaaagaaaaattaagatgtgaaaataatgcataaaagacaggattttttgtgctaccaattctggccttactgga

SEQ ID NO: 84 - DNA, 238 bp, Homo sapiens
gacacatgggtgctattggggttgggggggaggtgaggtaccagccttggatactccatggaattcgagctccacttggacatgggccccagataccatgatgctgagcccggaaactccacatcctgtgggacctgggccatagtcattctgcctgccctgaaagtcccagatcaagcctgcctcaatcagtattcatatttatagccaggtaccttctcacctgtgagaccaaatt

SEQ ID NO: 85 - DNA, 561 bp, Homo sapiens
ttgagttctccttttaagtaccaatgatacttaaatttctcagaaatgtaatggtgtgtcattgccttgaaatgcttgcttagggcttcttttatgttatcttaaaaagtgctggtgaattttccattttttacatccatttcacatgtaagagacacaaaagtctagattggtcttgatattgagataataaaaagtaagtagcattaagaaaggtaacaatcttcattctacagatgaactcattgaaacaatttaggggaatgaggggcaaaaggggagaaatactgctaaagaacatgagcataaaaatgcgtgcgtttcagtgtttaagaaggcttgataaagaatgtcacttttttatttaactgataagatttttgttattttttactttgataagtaaaccaaagaatatttgtatttcaagcagtttgtgtggtgtttctatataattttctgtgtataaataataaagtaggcatttgtttattttgtaaaaaagaaatgaaaatctgctggccagctatgtcctctaggaaatgacagacccaaccacca

SEQ ID NO: 86 - DNA, 594 bp, Homo sapiens
  misc_feature (0)...(0): n is c, t, a or g
taaccatgacaatcaacgaggacatggcgctggaggagcctctatacttaccttctgggatgctaggctgtacaaaatggcagttggatttatgcttgctcatccttatggatttacacgagtaatgtcaagctaccgttggccaagatattttgaaaatggaaangatgttaatgattgggttgggccaccaaatgataatggagtaactaaagaagttactattaatccagacactacttgtggcaatgactgggtctgtgaacatcgatggcgccaaataaggaacatggttaatttccgcaatgtagtggatggccagccttttacaaactggtatgataatgggagcaaccaagtggcttttgggagaggaaacagaggattcattgttttcaacaatgatgactggacattttctttaactttgcaaactggtcttcctgctggcacatactgtgatgtcatttctggagataaaattaatggcaactgcacaggcattaaaatctacgtttctgatgatggcaaagctcatttttctattagtaactctgctgaagatccatttattgcaattcatgctgaatctaa

SEQ ID NO: 87 - DNA, 466 bp, Homo sapiens
tgagctacaggactcccgagtgtgagccgcggttcctctgttgcagcgcagccgtgtgtgctgtggagccgaggccgtcctgcaggaagccgcgtgactcccgcctcctccctgtgctctctggctctggactgtgactgcgcctggattctgccattgcgacacatttttgtgcctttcagcccctggtgtctgcagtgggggatttaaggcacccgcttccacttctttcttgtttggagttttctgttggaaccgccggcgttggctccgaagacttagcgacgccactggcggcaccttctcctgcgcccagtgatgtttccacggtgcctgtacacagccgagcagcatttccgttgaaggacttgcatccccattgcgggcagtgctggacgtgtcccggagacccaccgggaggcgccgcatgccttgtacccccaccgtgcaggttgtggccggtttt

SEQ ID NO: 88 - DNA, 437 bp, Homo sapiens
ctggcctctactacgtggacagtgaagggaaccggatttcaggggccaccttctctgtaggttctggctctgtgtatgcatatggggtcatggatcggggctattcctatgacctggaagtggagcaggcctatgatctggcccgtcgagccatctaccaagccacctacagagatgcctactcaggaggtgcagtcaacctctaccacgtgcgggaggatggctggatccgagtctccagtgacaatgtggctgatctacatgagaagtatagtggctctaccccctgaaagagggtggatgcagctgcttgtgtttcttggggtgactgtcattggtaatacggacacagtgacccatcctccatcctatttatagtggaagggccttcaattgtatcagtacttttttttaagctctggcacattgacctctat

SEQ ID NO: 89 - DNA, 101 bp, Homo sapiens
cgatcaccaatgtacctccagaggtaactgtgctcacgaacagccctgtggaactgagagagcccaacgtcctcatctgtttcatagacaagttcacccca

SEQ ID NO: 90 - DNA, 415 bp, Homo sapiens
agcgacttcttctgaggaggttcctggcctctgtcatctccaggaagccctctcagggtcagtggccacccctcacttccaaagccctgcagaccccacaatgcagtcctggtggcctgactgtaacacccaacccagcccggacaatatacaccacgaggatctccttgacaacctttaatatccaggatggacctgactttcaagaccgagtggtcaacagtgagacaccagtggttgtggatttccacgcacagtggtgtggaccctgcaagatcctggggccgaggttagagaagatggtggccaagcagcacgggaaggtggtgatggccaaggtggatattgatgaccacacagacctcgccattgagtatgaggtgtcagcggtgcccactgtgctggccatgaagaa

SEQ ID NO: 91 - DNA, 288 bp, Homo sapiens
ggccaccctggagaaatgtgccacgtgctcccagcccatcctggaccggatcctgcgggctatggggaaggcctaccaccctggctgcttcacctgcgtggtgtgtcaccgcggcctcgacggcatccccttcacagtggatgctacgagccagatccactgtattgaggactttcacaggaagtttgccccaagatgctcagtgtgcggtggggccataatgcctgagccaggtcaggaggagactgtgagaattgttgctctggatcgaagttttcacattggctg

SEQ ID NO: 92 - DNA, 478 bp, Homo sapiens
cagttgtctggggaggattaccgctggtggtggcgatctgtgctgagtgttggctccaccggcctcttcatcttcctctactcagttttctattatgcccggcgctccaacatgtctggggcagtacagacagtagagttcttcggctactccttactcactggttatgtcttcttcctcatgctgggcaccatctcctttttttcttccctaaagttcatccggtatatctatgttaacctcaagatggactgagttctgtatggcagaactattgctgttctctccctttcttcatgccctgttggactctcctaccagcttctcttctgaatgactgaattgtgtgatggcattgttgccttccctttgccctttgggcattccttccccagagagggcctggaaattataaatctctatcacataaggattatatatttgaactttttaagttgcctttagttttggtcctgat

SEQ ID NO: 93 - DNA, 419 bp, Homo sapiens
  misc_feature (0)...(0): n is c, t, a or g
gggtcattgtttaagatctggctggtggtacctagcctgctggaactggcatgggagaagctgcttgcggccttccctaaccttgcaaacctctcccgaacacaacttctgcaccttggactcacacagggactcatcgaacgcttgaaatgaggatttntggactgttcattgatactggaaatgttaatttaaagagactcctttatttatgggcagtgtagaatgtgctacaaagaggattggttaccctgatcaaggccttatttagaaaatacatcagatgcctttctgtaaattggtttttcagtttatggacatctcactttcccacgtgcttccttctttgcttctgttcctcctgacccattacatgcacatgtactcacatactccctcttccttctcgatggagttaa

SEQ ID NO: 94 - DNA, 437 bp, Homo sapiens
tcgggccagtgaccatgacggggccacgtgtgctgtggccaggcctgcagacagacctcaagggacagggaatgctgaggcctcgaggggcctcccggggcccaggactctggcttctctcctcagacttctattttttaaagactgtgaaatgtttgtcttttctgttttttaaatgatcatgaaaccaaaaagagactgatcatccaggcctcagcctcatcctccccaggacccctgtccaggatggagggtccaatcctaggacagccttgttcctcagcacccctagcatgaacttgtgggatggtggggttggcttccctggcatgatggacaaaggcctggcgtcggccagaggggctgctccagtgggcaggggtagctagcgtgtgccaggcagatcctctggacacgtaacctatgtcagacactac

SEQ ID NO: 95 - DNA, 393 bp, Homo sapiens
  misc_feature (0)...(0): n is c, t, a or g
gtgagactgaattcttgcaatgcataagatataaaagcaaatatgactcactcatttcttggggtcgtattcctgatttcagaagaggatcataactgaaacaacataagacaatataatcatgtgcttttaacatatttgagaataaaaaggactagcaaataaaactcattttgcatttaaaagttggnattatattttagtcccaagaagacaaagtcgcagattaacaacactttaaaaatatnactcccattttattgtgttagattgcagtacaatgaatgaataaggggatttatttaaaagatcttaactttcttgactgatttaaaaagctaatcaatttattaaagccagaaatgttctcctctgggaaagcaatttctatct

SEQ ID NO: 96 - DNA, 540 bp, Homo sapiens
gaattgcaaaactgacatcccatttcacagcaatagtgacctttatttaaattgttgtgttatagtttatgcttcttaaatcatttttcaacctaaacagccaatttctaagcagacaggaaaactaaataataagttaattaatataacaaagatgcaggttcctgctcattccagtaatgtctttgaaagcaaaactaatatttattttctagattatccctgtgaataattgagaactttttggagtcaagtatgaataaaggtgtggcagaatataataatctggactattttctataggataattgctgggttataaaatcttaggtttgcttatgcccagtagctcctgcggaggcttaataataggcaattttgaatttgttcaaacctgtaatggcttgtaaacaaagatgaccatcagctgtttctcacatctatagtgacaataaagcgggaagtataagatttaataggaggggttaaggttcatgagaaccatggaaagatgtggtctgagatgggtgctgcaaagat

SEQ ID NO: 97 - DNA, 484 bp, Homo sapiens
gcatccaagcatgatgagccctctcacggtgcaatggagtgcacggtctgaatctgcacagagcaagatgctgagtggagtcgggggctttgtgctgggcctgctcttccttgggacagggctgttcatctacttcaggaatcagaaaggacactctggacttcagccaacaggactcttgagctgaagtgcagatgaccacattcaaggaagaaccttctgccccagctttgcaagatgaaaagctttcccacttggctcttattcttccacaagagctttgtcaggaccaggttgttactggttcagcaactctgcagaaaatgtcctcccttgtggcttccttagctcctgttcttggcctgaagcctcacagctttgatggcagtgcctcatcttcaacttttgtgcttccctttacctaaactgtcctgcctcccgtgcatctgtactccccttgtgccacacattgcattattaaatg

SEQ ID NO: 98 - DNA, 432 bp, Homo sapiens
tagtctaattgaatcccttaaactcagggagcatttataaatggcaaatgcttatgaaactaagatttgtaatatttctctctttttagagaaatttgccaatttactttgttatttttccccaaaaagaatgggatgatcgtgtatttatttttttacttcctcagctgtagacaggtccttttcgatggtacatatttctttgcctttataatcttttatacagtgtcttacagagaaaagacataagcaaagactatgaggaatatttgcaagacatagaatagtgttggaaaatgtgcaatatgtgatgtggcaaatctctattaggaaatattctgtaatcttcagacctagaataatactagtcttataataggtttgtgactttcctaaatcaattctattacgtgcaatacttcaatacttcat

SEQ ID NO: 99 - DNA, 413 bp, Homo sapiens
  misc_feature (0)...(0): n is c, t, a or g
aatgactgcaaaagtgccacggatatcaatttgagggttataaattttagcaagttggtaaattcacaaatacataaccttgaataatgaggatcaactgtaccatatttaataaagcacaaaacccananananngtcttattacagcatttgataaaatccaaaactctttcataaaaacactcaacaaacttaggaataaaaggaatcttcctagatatgataaatataacatctatgaaangcccacacctaacattatacttcatggtgatagactgaaggctgaatgttttccccttaagattgggaagaaggacaaggatgttcactcggcactacttctattcagcattgtacttgaagttctagccacagcagttaggttaggaattcaaggtttgttcaacat

SEQ ID NO: 100 - DNA, 409 bp, Homo sapiens
agtcaagtgaccagcctctgactgtgcctgtatctcccaaattctccactcgattccactgctaaactcagctgtgagctgcggataccgcccggcaatgggacctgctcttaacctcaaacctaggaccgtcttgctttgtcattgggcatggagagaacccatttctccagacttttacctacccgtgcctgagaaagcatacttgacaactgtggactccagttttgttgagaattgttttcttacattactaaggctaataatgagatgtaactcatgaatgtctcgattagactccatgtagttacttcctttaaaccatcagccggccttttatatgggtcttcactctgactagaatttagtctctgtgtcagcacagtgtaatctctattgctattgcccc

SEQ ID NO: 101 - DNA, 512 bp, Homo sapiens
  misc_feature (0)...(0): n is c, t, a or g
acagcaagcctatgtagttcaattaatatataaggaaaaggaaggtctttcttcatgatacaagcattataaagtttttactgtagtagtcaattaatggatatttccttgttaataaaattttgtgtcataatttacaaattagttctttaaaaattgttgttatatgaattgtgtttctagcatgaatgttctatagagtactctaaataacttgaatttatagacaaatgctactcacagtacaatcaattgtattataccatgagaaaatcaaaaaggtgttcttcagagacattttatctataaaattttcctactattatgttcattaacaaacttctttatcacatgtatcttctacgtgtaaaacatttctgatgattttttaacaaaaaatatatgaatttcttcatttgctcttgcatctacattgctataanggatataaaatgtggtttctatattttgagatgttttttccttacaatgtgaactcatcgtgatcttgg

SEQ ID NO: 102 - DNA, 482 bp, Homo sapiens
gattgagtcatcgacattcaggatttaagtctgaggtagtcaaccctcaggaaaaaaaaaatggcttatctgaaatcagtactgtggaaatgaactatattagctattatgaataatgtccagtataagaatatgcttctggaattgagttctccttttaagtaccaatgatacttaaatttctcagaaatgtaatggtgtgtcattgccttgaaatgcttgcttagggcttcttttatgttatcttaaaaagtgctggtgaattttccattttttacatccatttcacatgtaagagacaaaaaagtctagattggtcttgatattgagataataaaaagtaagtagcattaagaaaggtaacaatcttcattctacagatgaactcattgaaacaatttaggggaatgaggggcaaaaggggagaaatactgctaaagaacatgagcataaaaacgcgtgcgtttcagtgtttaagaagg

SEQ ID NO: 103 - DNA, 498 bp, Homo sapiens
  misc_feature (0)...(0): n is c, t, a or g
aatgggtttaatgaggtctaccttgcagagccattgtgagcattggaaatgatgaatgaatcataccagaacgtctagtataattacagtcatgcattgcttaacgatggggatacattcttagaaatgtgtcactaggcaattctgtcattgtgtaaacattataggatgtacttacacaaacctagatgttatatgtatttttatttacatgtatattttcacatgaaataccaaatgtcacagcattattactgaatgtcagtcatttcccctacttgatctgcaatgccaatatcaagggccatgtatcaggtttctgtatatgttccactataatcttatgggaccatggttttaaatgtggaatcattgacagaaatgtntttatgtagcatatggctgtgtatcactagtatataatagagcaatattatggaggaatatgtagatccaatcactttacctatacaaaatgactgctatggtgggaacaca

SEQ ID NO: 104 - DNA, 548 bp, Homo sapiens
gcgtaagagggctctggtcttccaaccagtggctgagctgaaggaccagacagattttgagcatcgaatccccaaggaacagtggtggctgaaactgaggcccatcctcaaaatcctagccaagtacgagattgacttggacacttcagaccatgcccacctggagcacatcacccggaagcggtccggggaagctgccgtctaaacctctctggagtgaggggaatagattacctgatcatggtcagctcacaccctaataagtccacatcttctcagtgttttagctgtttttttcattaggtttccttttattctgtaccttgcagccatgaccagttctggccaggagctggaggagcaggcagtgggtgggagctccttttaggtagaatttaacatgacttctgccccagctttatctgtcacacaaggctgggcacctctagtgctactgctagatatcacttactcagttagaattttcctaaaaataagctttatttatttctttgtgataacaaagagtcttggttcctctactactt

SEQ ID NO: 105 - DNA, 408 bp, Homo sapiens
cagaaacctcgatatataattgtatagattttaaaagttttattttttacatctatggtagtttttgaggtgcctattataaagtattacggaagtttgctgtttttaaagtaaatgtcttttagtgtgatttattaagttgtagtcaccatagtgatagcccataaataattgctggaaaattgtattttataacagtagaaaacatatagtcagtgaagtaaatattttaaaggaaacattatatagatttgataaatgttgtttataattaagagtttcttatggaaaagagattcagaatgataacctcttttagagaacaaataagtgacttatttttttaaagctagatgactttgaaatgctatactgtcctgcttgtacaacatggtttggggtgaaggg

SEQ ID NO: 106 - DNA, 555 bp, Homo sapiens
aaggcttggatgcgtgtgtaatagagccttatggtgtgtgcgcacacaccacgagggagagtttgaaaaatgcttattggacacgtaacctggctctaatttgggctgtttttcagatacactgtgataagttcttttacaaatatctatagacatggtaaacttttggttttcagatatgcttaatgatagtcttactaaatgcagaaataagaataaactttctcaaattattaaaaatgcctacacagtaagtgtgaattgctgcaacaggtttgttctcaggagggtaagaactccaggtctaaacagctgacccgagtatggggaatttatccgttaccaatttatccttgaccaataacctaattgtctattccgtagttataaaagtccccatccttattagctctactggaattttcatacacggtaaatgcagaagttactaagtattaagtattactgagtattaagtagtaatctgtcagttattaaaatttgtaaaatctatttatgaaaggtcattaaaccagatcatgttcctttttttgt

SEQ ID NO: 107 - DNA, 391 bp, Homo sapiens
ggtgctgccctgtgtacatataaatgaatctggtgttggggaaaccttcatctgaaacccacagatgtctctggggcagatccccactgtcctaccagttgccctagcccagactctgagctgctcaccggagtcattgggaaggaaaagtggagaaatggcaagtctagagtctcagaaactcccctgggggtttcacctgggccctggaggaattcagctcagcttcttcctaggtccaagccccccacaccttttccccaaccacagagaacaagagtttgttctgttctgggggacagagaaggcgcttcccaacttcatactggcaggagggtgaggaggttcactgagctccccagatctcccactgcggggagacagaagcctg

SEQ ID NO: 108 - DNA, 327 bp, Homo sapiens
gaaaatattcctgacgtggtcccgggcagccatctgactccaatagagagagagagttcttcacctttaagtagtaaccagtctgaacctggcagcatcgctttaaactcgtatcactccagaaattgttctgagagtgatcactccagaaatggttttgatactgattccagctgtctggaatcacatagctccttatctgactcagaatttcccccaaataataaaggtgaaataaaaacagaaggacaagagctcataaccgtaataaaagcccccacctcctttggttatgataaaccacatgtgctagtggatctacttgtg

SEQ ID NO: 109 - DNA, 454 bp, Homo sapiens
  misc_feature (0)...(0): n is c, t, a or g
tcagccctgatgcacaggctgccagccccccagtccagccctctcccttccactggtgccttgcttagagccagaagggatgaagccgggggatctatggaacagaggaggagcgatgcagttgggagaggaagctagaagggttatggttggagttctgtanagtgttgagtttccgacagggaaagaggattcctccaatgcncctagagagaaagcctgagcaggagatgatgcagcagaggggaagggccctgtggtgccgccgcccttccttcagcctccgaagggtgatggaaatggagagtggaggaccaggcctccagctgtctggcctcgcccttcacgccttaacactaagcccacctcccctgctctccttcccagcattgagcccttggttgcctgggcccaggctgggggttttcagtatttgtaagcatttcagcagaac

SEQ ID NO: 110 - DNA, 370 bp, Homo sapiens
tggagtgtgttcctgaagagcagccaggaggccagcatggctggagaggcaggcataggcagggaaccgagcagcaggtcagagcaggcgagctgacattctgcagcctggacggccatggcaggaagcttttagttggagagatacaggaagcctcctagggttctgagcagaagaggggcatgagctgattcacattctgaaggacctctctagctggccagtgctgaggaggttggagagagaaagggtgaaagcagagagaccagtgcagggctgttaacagggttgcaggcgagagactggggtgctgggctcccctagactaggactccagtgccctcctctcccaagagacaaaggccattgc

SEQ ID NO: 111 - DNA, 518 bp, Homo sapiens
  misc_feature (0)...(0): n is c, t, a or g
aaatcgtggcaaaatcttccctccagtactcctctccagcacctgatggttgtggtgaccagactttaggggacttacttctcacgcctaccagaatctacagccattcactgttacctgtcctacgttcaggacatgtcaaagcctttgcccatattactggtggaggattactagagaacatccccagagtcctccctgagaaacttggggtagatttagatgcccagacctggaggatccccagggtcttctcatggttgcagcaggaaggacacctctctgaggaagagatggccagaacatttaactgtggggttggcgctgtccttgtggtatcaaaggagcagacagagcagattctgagggntatccagcagcacaaggaagaagcctgggtgattggcagtgtggttgcacgagctgaaggttccccacgtgtgaaagtcaagaatctgattgaaagcatgcaaataaatgggtcagtgttgaagaatggctccctgacaaatcatttc

SEQ ID NO: 112 - DNA, 441 bp, Homo sapiens
ggtggccgagagtaaatgtggggacctagaggaggagctgaaaattgttaccaacaacttgaaatccctggaggcccaggcggacaagtattccaccaaagaagataaatatgaagaggagatcaaactgttggaggagaagctgaaggaggctgagacccgagcagagtttgccgagaggtctgtggcaaagttggagaaaaccatcgatgacctagaagatgaagtctatgcccagaagatgaagtacaaggccattagcgaggaactggacaacgcactcaatgacatcacctccctctgagccccacgccagcgtggccacctcagctctcttctctcctctcctttccattctctctatggggaggggagcaggcaggaggagcagaaattgccaacattgcacagccaggctgggagcagcctagggagagcccc

SEQ ID NO: 113 - DNA, 295 bp, Homo sapiens
  misc_feature (0)...(0): n is c, t, a or g
accaatgaggttcctgaggtcacagtgttttccaagtctcccgtgacactgggtcagcccaacaccctcatctgtcttgtggacaacatctttcctcctgtggtcaacatcacntggctgagcaatgggcactcagtcacagaaggtgtttctgagaccagcttcctctccaagagtgatcattccttcttcaagatcagttacctcaccttcctcccttctgntgatgagatttatgactgcaaggtggagcactggggcctggatgagcctcttctgaaacactgggagcctg

SEQ ID NO: 114 - DNA, 432 bp, Homo sapiens; identical to SEQ ID NO: 7
  misc_feature (0)...(0): n is c, t, a or g

SEQ ID NO: 115 - DNA, 144 bp, Homo sapiens
tcaccgtcacagagtcttaccaaagtcaggacagttcaaataacaatccggagttatgcgtcctcttgaaaaagccgaagacccggcggctctggtcccgcttccccccatggcgacgaacagctggcactgagtagcagctgc

SEQ ID NO: 116 - DNA, 253 bp, Homo sapiens; identical to SEQ ID NO: 8
  misc_feature (0)...(0): n is c, t, a or g

SEQ ID NO: 117 - DNA, 494 bp, Homo sapiens
caaggcatctgttgctttgggtcctccacgactcttaggcccgcctcaacaacccaggcacctcctaggtaggctcaaaggtagacccgtttccaccgcagcaggtgaacatgaccgtgttttcaactgtgtccacagttcagatccctttccagattgcaacctggcctgcatcccagctccttcctgctcgtgtcttaacctaagtgctttcttgtttgaaacgcctacaaacctccatgtggtagctcctttggcaaatgtcctgctgtggcgttttatgtgttgcttggagtctgtggggtcgtactccctcccctcccgtccccagggcagatttgattgaatgtttgctgaagttttgtctcttggtccacagtatttggaaaggtcactgaaaatgggtctttcagtcttggcatttcatttaggatctccatgagaaatgggcttcttgagccctgaaaatgtatattgtgtgtctcatctgtgaa

SEQ ID NO: 118 - DNA, 306 bp, Homo sapiens
gaggaaaatgaagctcgggctggttaactgacttgctcagcgtcccatggcctagccgcccgtgactctcacactgtctcctgcatgacgggtggcgcctcccgcagcttcccttctctctccagtgctgcccgctgtgtctagcagcctctaggatcttgtcagagctgcacctctctgtgaactggccattcctttcggtgctgctgtcctttttgggggggttcctgatttctgtatacatgtagctttgccagatatgtacttagtaatataaactgtattaataaaatccatttactgtgt

SEQ ID NO: 119 - DNA, 468 bp, Homo sapiens
  misc_feature (0)...(0): n is c, t, a or g
acaggtttgatggcacttctcatgatacattttagttattcttataaaagcaaacaggcaaacatgagtgtaaattaaagacaaaaagaaaactctggttttatatttgagancacgtgaaaaatcatgggtcaacataaaatcttgagaaccttctactttctcngggaaagcattatatagtggtgcattagtttagaaagtcagctatgattttgcctatagttctagttattagctttggggttttcttgtactttaagacatacctgtaaattgaacctatttgaattatattccactgtatgtgtattatggctcttttcctattagagcaacttgtgtttccctgataatgtgtacattttttaggcatgtacttaatagttcacaatgttctaaatttggaaggacttaaaaaaaaaacttgtttaaatttccatctgttttgtaatatctagctctata

SEQ ID NO: 120 - DNA, 549 bp, Homo sapiens
ctccccaagctcctttaaccaggagcttccctcccagagtgagctacgtcttgggaggattgaagcagggaggtggcagtggctagagttgctcagatcggctcagatgaaggcccaggggtcaaagcatttgctcaccacaactgagtctggaaggcactgtgcagccaaaccctcttgtccaatcacatgcaggccccaggcccctcagaaacgccctggtggagggaggagcccaacagatagggtcagggagtcagtggggaaagcagaggggagagcttagagtgaaacttgaaactgctatggacatggaggtcagatgggaacttggaactgggcatgaatcctgaatggtggggaaacttgaagccatcacagccaagaggtggggttccatgacctgccctgaggtcagcagctcccagactcctttgccctcactagggaagccccagtcaccggacttgtccccatggagtgaagagaggccccatttttgagtgttgtgtgtccaaaacagtgttgtgtcactggtggtcatgttgc

SEQ ID NO: 121 - DNA, 421 bp, Homo sapiens
tggagggattgtcctttcaagcaccacagcttcagataaaattagtactttcaaatattgtccactttaacttaaaaaattctagagggattatattggagactcaactgcccttggttttagtttataaaatggcctagtactgtggaattttaattttagaaagtcttagcatcagatcataaacattcattaaaagaactcacatcccatctgaaacttcccaggggagttgggattcttagtagattggtagaaaggggctcattttctactgcatttcccatttttggtatcttgttcagcatgttttatttttatttcttgtctgcagaacatcctatatttatgagaacattctttaagaagaccaccacatagaataccccttcctatcagctcgctctgatttagccttaat

SEQ ID NO: 122 - DNA, 502 bp, Homo sapiens
  misc_feature (0)...(0): n is c, t, a or g
tggttccttcagagggtgtctctgcctcacannctagtagtatttagaaataggctgtgctgtcagctgtaaaagatcaggaggcagcagacaccactctggtttcttcactgcattcagcaatgcctgaagttagtgctcagnccgggcatctcaaaagaaaagatacttgagttattcacattttaaaattcaaaacggttcatttttaagtggcagtgatgaatcagaaatttggaagatgatacgggtttcttttttccagggaggaggaatgggttgggtagggaactggacaggcttggacctcatgtttcatttctaatttcaaaatacttattagcaaattgggcaacaatgggcatcttccatgccaccacccaggcataaccagttggtttgtttccttctgaggaaggtttcaaatgtgtctagtgttcagtattgaggacaaagaaatacaagtggcaggcccaagtattttctgtgatatcccaggtta

SEQ ID NO: 123 - DNA, 542 bp, Homo sapiens
  misc_feature (0)...(0): n is c, t, a or g
gaggtctcagctcttggaggagggctaaggctttagcattgtgaagcgctgcacccccaccaaccttaccctcaccggggaaccctcactagcaggactggtggtggagtctcacctggggcctagagtggaagtgggggtgggttaacctcacacaagcacagatcccagactttgccagaggnaaacannccttccaattgcccctccacccccagctgaggcccggtcacctggtcaggacagagcaactgcatctaaaagcacaagaagacagaaacctgtaagctctgaccccacccccaccccttgagaggtcagcggaccacctccttagggacagaccctggcaggtcgctgcccaccgagatttcctcaagtgtgcatagatctgagaggagtcgggagtcgagactcgagattccatcatagcgtaggtgtgtggggttgggagccccctgatgggcttgtctgtgtttgcaccttgtcctgtgtctgaggtcctgtgactgtaccctcctttgccctgggacatctgtatc

SEQ ID NO: 124 - DNA, 452 bp, Homo sapiens
  misc_feature (0)...(0): n is c, t, a or g
ctaggcttgctttatcatcacatcccaaggccagagggctgctgctgtccccatcttgngccctgctagaagagggatagngggtggctggcatgatgnggtgaggggnnnannagaatatgcagaggccttggaggaagaggactggcagttatgacaggaaggctctctatacctggctccccagtgttctgcccctggcactgagcatgaggagccaggctttggggagactttgcaatcacccccccaacctggtccattttccacaggtagctttcttgaactcaccttgacccctcctcagccagcagcccccacctccaggggcaaaggagctgaaagacagtcctgaactggggggagctgggatcacatcagccaggccctgtccctcacaggaagtgagatgaggtgataccatggatggtgactaaggccccaaagtccct

SEQ ID NO: 125 - DNA, 263 bp, Homo sapiens
  misc_feature (0)...(0): n is c, t, a or g
aggggaagaaacgacagcctcacttctgtatggactgctgatgtggcctgccatcctgttcagcgggcattgtctttggagcagcaggagantaggatgcctctcactcacatgccagttcctggctggccagctgctcagggctcaggctggggcctcccattgacatcctccccctacactccctctntgagcctccgtcgcccctcctgttgggtaagggtgttgagtgtgacttgtgctgaaaacctggttcatatata

SEQ ID NO: 126 - DNA, 475 bp, Homo sapiens
  misc_feature (0)...(0): n is c, t, a or g
caatctatattcacaggcccatacttcagtcagtccaatcatagtacagtgatcgaccaanngnnnnnnnnnnnnncnnnnttgtaaaatacggatcatttgtattttggggtgataaaatagttcaccatgggtatgagatatttattctttaaatcaaagtaaattagaatttttaaaaagcacaaaactgcaggacagtttatgaaataggtggcactattagggaatcttcctttaaagcaagaaatcatgttatttagaaagaaaaactaatcttaaacatactatttctaataaatatttatatttttatgaaataaagaggtatgtggaaattaatatttggtgatgttggacagtggaaaagtatctagagtttttacctgccttatctgaattcttcttgaaacttgagcttaaactctaatagctgtttccctttctattctgaacaactgtctccatttttcaa

SEQ ID NO: 127 - DNA, 399 bp, Homo sapiens
tttgatggggacagcccacgtctgatagggtgggacatggggcagcagttagagggttgtgctctttctagtgtgggatagtttgcaagatgatatgttgtagccacttctgcagtgacggggacagaaggagtcagtgttcttaactacagtggtagcagcagaaaagaagggtaagcagggttctagaaatttgtgttatgttttctccccactgtatttatttctttggttagtggtgcaagaaattctgttttcctgtagcaaattaataaagcgttcaaacataaggaattacgacaacagcttgtagatgccagacttcaacaaacagcacagctgataaaagaagctgatgaaagacatcagagagagagagagtttgtaagttctacttct

SEQ ID NO: 128 - DNA, 524 bp, Homo sapiens
gtgccagacttctgagaagcacctgccagcaacagcttccttctttgagcttagtccatccctcatgaaaaatgactgaccactgctgggcagcaggagggatgatgaccaactaattcccaaaccccagtctcattggtaccagccttggggaaccacctacacttgagccacaattggttttgaagtgcatttacaagtttctggcatcactaccactactgattaaacaagaataagagaacattttatcatcatctgctttattcacataaatgaagttgtgatgaataaatctgcttttatgcagacacaaggaattaagtggcttcgtcattgtccttctacctcaaagataatttattccaaaagctaagataaatggaagactcttgaacttgtgaactgatgtgaaatgcagaatctcttttgagtctttgctgtttggaagattgaaaaatattgttcagcatgggtgaccaccagaaagtaatcttaagccatctagatgtcacaattgaaac

SEQ ID NO: 129 - DNA, 534 bp, Homo sapiens
cgaagccggcggcgtgaacaatcctcgagcaggaactcacacctggttcagcatcaacacccgaactccagaaagagctctgcaggcggagcaaaggcagggcagccggaaagcagagccctggctttgtttgacatccaaaaaatcatgcaagagaaaaaccctgtgcacgttattggggtggaagagccttctgtgggtgcttccatgttatttgacatcagagaatccacataggagagaaactttgctgatgacttttaaccacaagtaaaaaatgtggtaagtccacatagtgtactcatggaaggaggggctgggggtagaaatgtcatgggtgacttctgactttctaaggaaatgatgcttcccaagcacccgaggttggttggtcccaaatctatcaaactcagtgccctctttagcgacatattttgtgacattccttccattacaccacagtgagttcacaggtaatataacctacccacctgtgtaatgtcaaaaaaaatcaatatgcggccccattttgta

SEQ ID NO: 130 - DNA, 501 bp, Homo sapiens
gttccttttcgattcttggtcttatttcttcacccatctactatagtgcattcttgccatgcagccctttttatggagcaagtcacaatacagcagcttgcttcattagggcaagcaagcaagacaagctgcagcaaatgcaagtaacatggaagtctttataatctaatcatggaattgacatagttaaaaacaaatcattaggtaggctccaaattgatcagaacatggttattggacaaaaccatgactgtcaggaggctgcatcatggggagccattttacaagcagcaccatgggtgttatgggggattttattacatttgttctgctcttaagagttgaaagtctttaaaaatgtgtaagtctgtcgtttgttcttgacttctgtcatgttttcaagaatgcattatgcaatgatgtagaatactgtttgtaaagtagttgtctagactctagtgaaaataattacagataatctcagttcatcaacgaatcggt

SEQ ID NO: 131 - DNA, 483 bp, Homo sapiens
  misc_feature (0)...(0): n is c, t, a or g
ctcagcctcctaaggagctatttttngnattttagtagagncagggtttcnccgtgtnggncaggctggtctcgaactcctgncctcaagtgatccacccgccttggcctcccaaagtgctgggattacaggtgtgagccaccgtgcccagctagattctttactttttaataaagttcaaaatagcttttaataaggttgtcaaatttgaccaaaatttcatagaagtccaaaatattatgcctctttctgtagatcaaatgaaatatggcccaatttacaagggtatacaccttcatggtagatgaatatagattttaaactagttttaaaaggaatatgaatgatttaattgtagtttctgctgccaaaaagtctccataattattttttaataacttataactaccttgatctttacctgtacacacacacacacacacannnnnntgcacagagtaatttcacttagaatcctggtca

SEQ ID NO: 132 - DNA, 470 bp, Homo sapiens
  misc_feature (0)...(0): n is c, t, a or g
ggactcacactggagaaagaccctatgaatgtaaacactgtggtaaagccttnagtcgttccagtttctgtcgagaacantgaaagaactcacantgnagagaagccctatgaatgtaaggaatgtgggaaagccttcagttctctcagttcctttaatagacataaaaggacacactggaaggatattctataagtgtatggaatgtgggaaagcattcattggttttatcacattcagatacttgaaagaaataaatcctgtgaatgtaaacgtggtaaagccttaagaagtttccaggctgggcgcagcggctcacacctgtaatcccagcactttgagaggccgaggagggcagatcacgaggccaggagatcgagaccagcctggctaacatgggaaaccctgtctctactaaaaatacggaaaaaaaaaaaaantagccaggcatagttgctcacacctgtagt

SEQ ID NO: 133 - DNA, 121 bp, Homo sapiens; identical to SEQ ID NO: 9

SEQ ID NO: 134 - DNA, 391 bp, Homo sapiens
acagagacgcaagagaaaaatccactgccttccaaagaaacgattgaacaggagaagcaagcaggcgaatcgtaatgaggcgtgtgccgtcaatatgcactgtacattccacaagcattgccttcttattttacttcttttagctgtttaactctgtaagatgcaaagaggttggatcaagtttaaatgactgtgctgcccctttcacatcaaagaactactgacaacgaaggccgcgactgcctctcccatctgtctatctggctggcagggaaggaaagaacttgcatgttggtgaaggaagaagtggggtgggacaacagtgaaatctaaagtaaaaccaagctggcccaaggtgtcctgcaggctgtaatgcagtttaatcagagtg

SEQ ID NO: 135 - DNA, 289 bp, Homo sapiens
gagaagaagtccccaacatgactgtaacttgttgattctttatatttcaagaggaagtgtccaaaactgatctcattcctctcctttcatcctgggagcagtgggtgtccagagcaaacaaaaagaacttattttggctggacagcaagcagagtgccagttccaaagatgagcttgtttgtagcaccaccataaatttgggaagcacagtaatacatggctgagtcttcctcttgagcaaatggtttcttcaggtggaaagatgtctcgcctttgttaaggtcagcag

SEQ ID NO: 136 - DNA, 427 bp, Homo sapiens
tgtaatcccagttacacagaagactgaggcaggagaatcgcttgaacgcaggaggcagaggttgcaggagctgagatcgcgccattgcactccagcctgggcaacagagtgagactctgtctcaaaaaataataataaaataaatgaacacacatgctgctgagtccgcaggggggcagagcagaggacagcgtgcttttgtgtactgttggaagactggctcctcctgtacagcacctctgagcccttgtgcaccgccctgccacgggcaccatccagtcctggccgtgtgaccacccacagctgactgggcagcaggcacaggccctacccgagcaggccggagttggctcgcatgactccagctgaggctgcctgtgtacatttctccagataccctatggctaattttgttataactgcacag

SEQ ID NO: 137 - DNA, 469 bp, Homo sapiens
tctcctttctcaccaatgggcaatagcccataattgaaataaatttctgattgaaaggtataggaaacattaaaatgcattactaagagaagtaatataattttcttacaaagtatttttcccaaagatagctttactatttcaaaaattgtcaaattaatgcatgctccttacaacaaacaaatatcaaaaagagtttaggaattctactagccagagatagtcacttggagaaactttctatatatccttctaaatatttttctgggcatgctcatgtatgtacatcagttgtttctttttattttgaaccaaaaatgtggtttcttttgtacacattacttaaactttctttccagtcaacaatatattgtggatttattttcactgttatatttaactatatataaatacgcatatattgtaattttaatgtctgcttagcaccccactgataaccaaatcacag

SEQ ID NO: 138 - DNA, 340 bp, Homo sapiens
  misc_feature (0)...(0): n is c, t, a or g
tagggactggcgccaaatggtctctccctgccaattttggtatcttctctggcctctccagtcctgcttactcctctatttttaaagtgccaaacaaatccccttcctctttctcaaagcacagtaatgtggcactgagccctacccagcacctcagtgaagggggcctgcttgcctttttttttgttncccggatcctggggtggggcagaaatattttctgggctggggtaggaggaaggttgttagcatctactgctgccgtaccctaggaatatggggacatggacatggtgtcccatgcccagatgataaacactgagctgccaaaacatttttt

SEQ ID NO: 139 - DNA, 526 bp, Homo sapiens
agtcctgtctgtgtggactggcacctgggctgctggagaagtctcctcccgttcggaccagcctcagggctgcacgttacctcaggaatgggccccaccatgaaggggcccatctgtcagcagcgtcttctaggtccccagctcagggagccatccccagctccagttttctcatgcgaatatgcacagttttaattcacgttgttacactagcctgccgatgagacccagacacaggcagacctggcgctcttgacccctgattccagtgaggactggccctgaggagtccttgcagacctgctgcctgccccacgacaggcccaaagatggaccccccctggccttgtgacagctccccaagtgttctccggtggagaaactgcagaggactggtgggcggggctccccagccatcaccatcctgtgtacaatggctgtagacttgtatatggctcctttaatattgtaaagatgctgatgtacaattgtcgtgcatttgtgtgaacacattgcgttcccagtc

SEQ ID NO: 140 - DNA, 486 bp, Homo sapiens
actgaattctccaacagactctaccccagctcttctctctgccactgtcactcctcagaaagctaaattaggagacacaaaagagctagaagccttcattgctgatcttgacaaaactttagcaagtatgtgaaacaagaagttctgggtcctttcatcataagggagaagcttcagaaagttccgaggacctgctaaaatcagctactagaatctgctgccagaggggacaaagacgtgcactcaaccttctaccaggccactctcaggctcaccttaaaatcagcccttgatcccatttctgggcaatttagacagtgaaactgactttgtttacctgcttgcagcatattagaacagacgatccatgctaatattgtattttctcttaaaacatagctttcctgtaatttaaagtgcttttatgaaaatatttgtaattaattatatatagttggaaatagcagtaagctttcccattataat

SEQ ID NO: 141 - DNA, 416 bp, Homo sapiens
tgctggctggccatttacttccagcccttatgaggagtttcccctgctgaagagccctgcctgccccagatcatacccccttcctgcctgtaacccttaccggctccatatggggtacaaaggtctggcctcctcaccccaacttgggaaaccctctggggccatcccagctccagagccccttgtggggtcagtgagacctcattgtggccacattacagcccagtgcctctccctgacaagcctgtacccagccggctcagcccacagcactgtcctatgaaccttcctgcacgccattctccacctcagtatctgctttcggggaacccaacctgcgacagtgcttctgtgtgttttcagtcctgcaggtttgaactctgactttggagacttttccagttatctcgtggaat

SEQ ID NO: 142 - DNA, 497 bp, Homo sapiens
gggcatggtaattagcctttccccatgttaatttattcagttttttcaagggtcaactgaattccccacttcctgggtaagaagcatgatctccttttaatttcacgtctaagatcctggcagcttcccctagctggttcctctgtagtcctgctgggactgtcagctcatttaaatgtgggtctgcagaaggctttaggtctcccccaacccccttacctttcacagaggaacctttcatcaggataaatgattattgctgccctgtgggtcttgctcaatactgttcatacctggagagagaaggtattgaaacatctcctttatgtgtgactttcccaaatttttaaaaattgtttatggtttaggccccttaaatactgtgtagcaggatgaagtctaccattaccagctgggtcaccttggatgggtctgtcaacatctaagcctcagttccctcacctgtaaaaatgagggtagtccctacctcataaggg

SEQ ID NO: 143 - DNA, 513 bp, Homo sapiens
ttccataggccgatgctctgaaagaagagacgtggggctcgagagatttaaagattttatttttacaaatcacagctgatagacagcgaagccttccccatagagaccgtgctccaactcgggcctggggcactgctcgctgctcccaggaagggggtggcgtgacaggcaggaacctgcgaagtccagagtccagggtggagcgcaccagcctcagccagagcagccacgacagccacagtgtgtgcactcgatgatgcggccctgcaacggaggaggacagtgagacgatgccactgcgccacgctcgcccctgcacactcacatatgtggcaaccctcccacgaaggacctgccaccatgccatatagggacacacctcagaaacccttccttgacagctctggacagggaaaatttggctccctcatgaaggtagaaccagctgctgttgacaccgaggttacatctgtatgtctatttataatatgttctgcaaatccaacacacgtt

SEQ ID NO: 144 - DNA, 558 bp, Homo sapiens
gacagttcagaatcatgttccccattctggtgttggatctataggtttattagaatccttaccacagagtccagattatcttcagtattctatcagtacagctctctgcagcttaaactcggtggtacataaagaagatgatgaacccaaaatgatggacactgtataatttggttaagactgctgaggccaagtgctattttgttacaagaaaggaagaacttggctattttcttgacacttttatgggtgctgcactttatttttgtttggtttttgatgggagggaaagagtactgaaatgttttgtaaattttttttaatgtgctgctaggttttttgttttgttttgttctgaagagaagagtggtaccatatgttgcaggaagtcaaactggactttttgtggctactaaatttgcctttaatcttattgttctcaattttggaatcaagtatgaaaatctgcacaaatgcaatgtttacaagaactggttgattctgggaggcatctgctacagtctctttttatatggatatgtacatgtcctattctac

SEQ ID NO: 145 - DNA, 528 bp, Homo sapiens
agtgttgtgtagcttaatccttctgaagtctttttgtcatgtagctattaatctgtggctatgaaatgatcagaaatgctaagtgagatcaatatttgtttggaaaaaaaatcttgggaaacaacccaagggttttcgctgttgttgtttttctttttctatttttgtttacttagtcctttagctagtggatttaattttgttgtgcctgcttcattttgcaataacaatgcagtagaatttaaaacttggatgcttaagaggcctgcatatagataagaatttcaggcaaaactacatttattgttaataacagcttgttcataggctcttgtattttatgtaactgtgataaataatgaaacttagttatattgaggttattgtttgtcggtgaagtgttagtcacagtattttcaaaagtttgcacatattgttctgtgtaattgtgtaagccataattacagtgtttaattctcttttcctattacatcattcattgaaagtgatcactttaccattttgaaa

SEQ ID NO: 146 - DNA, 429 bp, Homo sapiens; identical to SEQ ID NO: 10

SEQ ID NO: 147 - DNA, 519 bp, Homo sapiens
atcaggcacactttcttcagaggcatctgattttaacaaagttcatttaagtagacggggtggcatcatggcatctttatatacatcccatccagctgacaatggattaacattggagctctctttggaaatcaaccgaaaattacaggctgttttggaggatacgttactaaaaaatattactttgaaggaaaatctacaaacacttggaacagaaatagaacgtcttattaaacaccagcatgaactagaacagaggacaaagaaaacctaaaacaagcctcttgctcagtaaagagacaaaagccacacaggagtaggtgccactgacctctattgttggagactttgttccactttttgtttcagccagtaaaaatattgttttgcttcatctgtacacaaaaaaatacccttttacaatatgaatgcattgctgtatatactgtaagactgaaagctttgatgaaatttgtttttgtatggtgcaatatgacagcctgtcattgaatctaaaca

SEQ ID NO: 148 - DNA, 493 bp, Homo sapiens
agcagaggatgctcattcggctcagaagtggatagaagcatttcaggaaggcacaatattgtagcagtattggtttcatctcttctgtgattccaaagaggtggaatttcatcagaatggagtaaatgcaattcaaaaattgtataaaaatgaacactgccaagataaagccaaccagacccttcatcaaagaaattgttttgttaggtataagcaatttttaaaaggtgtttgttttttcatttatgttatttattaaaattttgatgtttacttaatggtcagaattatttctgagacacactgaattctaaagtaccatttctttagagaccagaaaaactatcttaatactgtatactgtattaactattcgtgacatagttcacactgttttcttaccttacattgtaacaatcttactggtggaaagtctttgtaaggaaaaaacacatagcaaggagcaaatttccacaaagtgcttggtttagga

SEQ ID NO: 149 - DNA, 511 bp, Homo sapiens
ttcttgcatccttctgtgattcaaaaaagtaaaatgtggctttctgaaatgatggataagagtctacatcttctagaaaaaatacataaaggagtagttaagctctgtaaatgtgccacgagctccaacacgaccatcgtagggtgaagcccacgttttcttccatggcctcaaaggccctagaacttgcctacctttctggccttacctcctagctacttatccatctcttgaactttatactcttgtataaatttctaactttcagaaaatgccatactctgttttggcaccacacatgtatatttccccctggtacacttggaagactcttatccatctgtgaaaccctatgttgtcatcacttggtccatgaaatattacctggccaatatcccaccatcacctcaaacccaatcaccccctcctctgtatgctgtcacacctatattattaaacttatcacattgcattgtaattacttcctgacctttgtatctactcttttagt

SEQ ID NO: 150 - DNA, 517 bp, Homo sapiens
aatatctttcctactagacactctcatttttatgttattataaacaataaggttcctttggtagaagtgaaagcttatcgacagatggccctactaagttctgcttttgcatttggttggagcaagtggaacctactatgtaattctacaaaagtcgtatttaaggtgagggaacaccttactgaagaatgtactgagaatcctaattgggcccttttaatgtttagtggtgacagagcacaaagactgaagatcaaggaagagagtgaggcattttctgaagcacttaaagaagaaactgagtttcattctactttatatcacatggtgaaggattttgcttctgaggaagcaatggagaaagtcaggagttccaactgtcagtttgtcaactctgtgtgccacatgctgctctctaccagattgctcagctactcctaacctccacttacaaactgtattgtaagtatgaagaaccaagcatggtgaaagacaggtatttctgcaacacaatgta

SEQ ID NO: 151 - DNA, 310 bp, Homo sapiens
cgccagtacatcttctagcattgtcgtggaagttctccgaatcctggttttgattggtcagattcttttttcactagcggcggtttttcttttatgtcttgttataaagaagtatctcattggaccctattatcggaagctgcacatggaaagcaaggggaacaaagaaatcctgatcttgggaatatctgcctttatcttcttaatgttaacggtaattctcaaactatgtgttatttatgtaatctgatacataatctctttcactgaaatcttgtgatccattctttacctttccattttaataatg

SEQ ID NO: 152 - DNA, 472 bp, Homo sapiens; identical to SEQ ID NO: 11

SEQ ID NO: 153 - DNA, 486 bp, Homo sapiens
gttgtttactgaatcctggtgtgaaagcatatcagatatgtatgaactgctactgctgtacttccgatttacggacatcattttattgctatttgtagacgtgataacatgaacatgagtacctatttatgtgggccttcagtggatgggcagtgccactcaggtctctggggtttccctctctaattttaagtaaattgacatataactactatgcttataaaaatgaagtaaggaaaacaagtagtcctgtttgccactaaaaacattttcaaaggaaaaataaaatgaaagtactttttactttttatgatactcagaaattaggatgaagaacttttaaaattgctgaaggtcaaagaggttatctctgccagtcacaagtgtggctggtgtcattctgggtctgactggagccctcctggactgtttctttaatttcaaaagccctgcagacatagtacctggtcagaactatgcctcggt

SEQ ID NO: 154 - DNA, 302 bp, Homo sapiens
aaagcttatccaccacgattaagccggcttcatccctgggatgcaaggctggttcagcatacacaaatgaataaacataatccatcacacaaacagaaccaatgacaaaagccacatgatatttacctgtatacctttttaagtacaaataaatctgggctgtcattatttatgctaacactggttttgtgtccctggaatctatctatctaagtttttttttctttttttctttttccattttccagtacctattagacagaatggctttcaattttttctcttacttccaaacttagtca

SEQ ID NO: 155 - DNA, 466 bp, Homo sapiens
  misc_feature (0)...(0): n is c, t, a or g
attttctagttttcattctgtacatttttagttagacatcagatttgaaatattaatgtttacctttcaatgtgtggtatcagctggactcagtaacaccccntttcttcagctggggatggggaatggattattggaaaatggaaagaagaaagtaactaaaagccttcctttcacagtttctggcatcactaccactactgattaaacaagaataagagaacattttatcatcatctgctttattcacataaatgaagttgtgatgaataaatctgcttttatgcagacacaaggaattaagtggcttcgtcattgtccttctacctcaaagataatttattccaaaagctaagataaatggaagactcttgaacttgtgaactgatgtgaaatgcagaatctcttttgagtctttgctgtttggaagattgaaaaatattgttcagcatgggtgaccaccaga

SEQ ID NO: 156 - DNA, 525 bp, Homo sapiens
cagcctagccttcaagtggtgtgagcggcctgagtggatacacgtggatagccggccctttgcctccctgagccgtgactcaggggctgccctgggcctgggcattgccttgcactctccctgctatgcccaggtgcgtcgggcacagctgggaaatggccagaagatagcctgccttgtgctggccatggggctgctgggccccctggactggctgggccacccccctcagatcagcctcttctacattttcaatttcctcaagtacaccctctggccatgcctagtcctggccctcgtgccctgggcagtgcacatgttcagtgcccaggaagcaccgcccatccactcttcctgacttcttgtgtgcctccctttcctttccctcccacaaagccaacactctgtgaccaccacactccaggaggcagccccatccccttccagcccctaagtaggccctcccctccctaaatctgcttccgcaccacctggtcttagccccaaagatgggccttctctctc

SEQ ID NO: 157 - DNA, 533 bp, Homo sapiens
  misc_feature (0)...(0): n is c, t, a or g
ttctcactctacagggtcctggtgaagagccagtgaggcccctggtacccaagccccctcccctgacctgggtgtgnctcgctgctggggctctgcaggggcagcacagctggggtgcaggccaggctgccactccgggaacgcctttgcgccgggactttttgtttctgaaggcagtcgatctgcagcggggccttatgctgccatgcactgccctggctcctgccggacccccagggtgggccgtggcaggtggctgagcaggagctcccaagtgccggccaccgctgtcagggattgcccacccctgggcatcatgtgtgtggggccggggagcacaggtgtgggagctggtgaccccagacccagaattctcagggctctacccccctttcctggtcctaggtggccagtgggtatgaggagggctggaaggcagagctttgggccaaaagcaggcgttgggggntcccccctcaagtttggagccgtttccgtggttgtagcagaggaccggaggttgggttcctgat

SEQ ID NO: 158 - DNA, 440 bp, Homo sapiens
  misc_feature (0)...(0): n is c, t, a or g
ctggcctacgtgttcaattttctatgaacaaaggctttagtccttgacccagggctaaagtggtctgtccaagctgttgttggtagagggagtatgataaaatgtttaaatctcatttggttaccttgagtcctggaacacgcagtaactgtcatgctatagtcntcatctgtatttggctgggaatacaaatgaagattgtggtgtattcaagcagtagggtttttgcttttgtttttgttttagtgccaacaaaacttttttttgtctgactacattaaagataagactgactatatttatacaacagaaactttgtaatagattttttcagctttgtgaaatcgaattttttttcatcagggctggttggatttcctttttaccctgtaatccaagcgttaatagtttgttagaagatgggttattgcatgtcactt

SEQ ID NO: 159 - DNA, 511 bp, Homo sapiens
  misc_feature (0)...(0): n is c, t, a or g
tctgggtttagggctagccctgcctccatctcccttgggtaaaatgaagggtgtggggtaaaagatgcataaggccnttttctagctctgacagcctagaagtccnaatcaccctgtaataaatatgtgttgaatgaagaaatgggtgaatgagcttgtcaatgtgattttaaaaaattgactaccntggaggaatgattaggaatctaaatgaagccagccctcggtatctgcaggtttctcatccatggattcaaccaactgcaaatggaaaatacgattttttttaaaaaaaggatggttacatccgtattgaacatgtacagacttttttcttgtcattattctctgaacaatacaagaactctttatgtagcatttacatttattaggtattntaagtaatctagagattatttaattaaaatatacaggaggatgtgtgtcagttatatgcaaattctgtaccattttgtatcagggaattgagcatcttcagatgttggtatct

SEQ ID NO: 160 - DNA, 540 bp, Homo sapiens
tcagagtggtttcattgccttcctaccctctctaatggcccctccatttatttgactaaagcatcacacagtggcactagcattataccaagagtatgagaaatacagtgctttatggctctaacattactgccttcagtatcaaggctgcctggagaaaggatggcagcctcagggcttccttatgtcctccaccacaagagctccttgatgaaggtcatctttttcccctatcctgttcttcccctccccgctcctaatggtacgtgggtacccaggctggttcttgggctaggtagtggggaccaagttcattacctccctatcagttctagcatagtaaactacggtaccagtgttagtgggaagagctgggttttcctagtatacccactgcatcctactcctacctggtcaacccgctgcttccaggtatgggacctgctaagtgtggaattacctgataagggagagggaaatacaaggagggcctctggtgttcctggcctcagccagctgcccacaagccataaaccaata

SEQ ID NO: 161 - DNA, 554 bp, Homo sapiens
aacatgctcacatacacagatctttccctttccttactagacctctctttagtttaagataagtttagacaggagaaagtgtatgtaaactacctgaaaggatgacaatcaatacaatgacaaatatgccagtttatttaatttgtttaaaaaaaaaaaggcagaaaacccaccatgggaaaataagcattttttaaaatctgaagttgctcttttcctgtgtggtctttgggaggagtctagtacaaaaactgaaaacctttggtcctgggaatttattttcatggctgttgtcatggctgagtagttttttgatgaattcaatcaatgcagagaacgcttttagataaatcagaactctccttaaaatgcatttcaatcagaagcaaagtacacccattatttatgcagacatgtaaaaaatctaaaaattcttgcaatgagtagtataagccacctatttttacttccttctctgaaatattccagttaactcagcttgggttctgtgctcctcctctcttcctatagaacactgtgcataccttgaataa

SEQ ID NO: 162 - DNA, 462 bp, Homo sapiens
  misc_feature (0)...(0): n is c, t, a or g
gagacacatgatgatttgcattgtaataatttctgtgtgtatgtgtgtgtgttgnnttgtttttataaagaaaagtgtgtttgtacccatgagttcagcatttctgccatcttgctattttcattttccctgtggaagatgcatggttgcatccttttccttctgaccaacacttagtctttaactttgtaaggttcggtttaaggtttcagggttagcactatagttttggttcattttctcattaacgataaaatatgctgtaaggcactataagaatataaatgattctattacaattgaaagttacttgacattacatgaattgaactgcctttcattatcttcagacactttgttttagtatttttttttaatttgctaggtttgtatatagaagatcctttcattatcaagaatgagtatggttgcttttgccatggttgcttttactattaataa

SEQ ID NO: 163 - DNA, 402 bp, Homo sapiens
ttgtgaaccatttaacccttttgatccaaggccccggaccaaggggatactgtaatcaggttatgtacaccaacctctgcatcagttgcttctatagagcatcagccctcatgtttcattgtcttaatgtcggggagcagcctggtgtcctgccccaggtgtccgcatttttgcatggtaaggaaaaggcttacttgcccttcagctcataaaagcagaaggtgtgctattcacagtaccatgcgagtagcccacagttaattcccggcagattctttggctgtgttttatctttaatgaacgtttctgactaatattttgttgtaaaccattaagtaatgtaacgcatgtaagatgcttagggtgcctggccaggactccgtggtttcctgttgtgacagt

SEQ ID NO: 164 - DNA, 523 bp, Homo sapiens
  misc_feature (0)...(0): n is c, t, a or g
atgagtctacctcacctatattgcactctggcagaagtatttcccacatttaattattgcctccccaaactcttcccacccctgctgcccctncctccatcccccatactaaatcctagcctcgtagaagtctggtctaatgtgtcagcagtagatataatattttcatggtaatctactagctctgatccataagaaaaaaaagatcattaaatcaggagattccctgtccttgatttttggagacacaatggtatagggttgtttatgaaatatattgaaaagtaagtgtttgttacgctttaaagcagtaaaattattttcctttatataaccggctaatgaaagaggttggattgaattttgatgtacttatttttttatagatatttatattcaaacaatttattccttatatttaccatgttaaatatctgtttgggcaggccatattggtctatgtatttttaaaatatgtatttctaaatgaaattgagaacatgctttgttttgcctgtcaagg

SEQ ID NO: 165 - DNA, 470 bp, Homo sapiens
cgatctcggtcgttcatctttaaatagatctttcttgccaaggaatgctctggcccaggagcaaggtggaatgtttccctgacgctgtgatctgcagcaggcttcaaatgaaaaccgactaaggattttctttcaaaaacaaatcagaagcagatgctgattgggacccatataccacgttgctgactcacgttgctgcccttccatgatgttgccatctccttgagaacactgaagcaatcaccattctgatagaaagtgcttaaaccaccactcttaggtctgctcactcttagaacacacaatggaagaggaagggtttttgttttcactcattgtggtccccaagcctattgacactagttgcctagagtcccactgtgagtcatggtcagcctgtctgacatccaggttgtgctattaaccaagaaggaaacagatacttggaggcttagatgacttctgcagga

SEQ ID NO: 166 - DNA, 504 bp, Homo sapiens
  misc_feature (0)...(0): n is c, t, a or g
ttatctttatccaacatttctccaaatggactgaaagaaacttttcaaggacagtgtattataacaatccctttcccagaattagttgtatagggttggcccaagagatgtaagaaaaatctcgcattgctccctaagcacccnggnccttattaaagagcaacttctatttccagtcgggggagtaacactaaagctacaagaaatatgtaataatgataggtaataatgtgttccaaagctttttcaaactagaataaggaggcaaatagaagaatgagatactgatgtccacagttcattggcagaatctaaccccttctgttatcttttttaatactatttttgtttagatagaagtttcaaagaagataaaaatgcttgaagagcctgagagtaaaaagattatgctgcaaagctatgatataaactgctcttgcagtccaaagggatacctgattaaagaagtttcttatttaaacatctcagacgcaaaaattacat

SEQ ID NO: 167 - DNA, 437 bp, Homo sapiens; identical to SEQ ID NO: 12

SEQ ID NO: 168 - DNA, 553 bp, Homo sapiens
gaagcctgacaccttcagggaccagctccaggagctctgcatcccccaagacctggtcggggacttggccagcgtggtatttgggagccagcggcccctccttgattctgtggcccagcagcagggggcctggctgccgcatgttgctgactttcggtggcgggtggatgtagcaatctccaccagtgccctggctcgctccctgcagccgagcgtcctgatgcagctgaagctttcagatgggtcagcataccgctttgaggtccccacagccaagttccaggagctgcggtacagcgtggccctggtcctaaaggagatggcagatctggagaagaggtgtgagcgcagactgcaggactgacccctcacttgaccagtcccattcagatccggcttggacaggcacctgagatggtgccaaagtgcagctgactcttcccacgacagccctgcccttcccatgaggcaggctcttcagtgagtgtttgaacgtaattatgtagttttctgtttaattgaaaaagagagctatgcctttttttctttttgg

SEQ ID NO: 169 - DNA, 417 bp, Homo sapiens
agaggcctgccgaggggaggagcctggcctctgtccacccgtcagcagtgtgaagtctgttgtgtttgagcttctcagagtggaatgactccttttccttcctggccctcgggggcctctcgaggtcagcctctcccaaccccctacctcagctcctgtctgcactgagaaacctccccgggtgatgtctgcaaagtctgtgctgtccgtgccccaggctgggagagctatctggggagggggagaggaggccgagcagaatacaccccagagttagggtttgcgactccgcctccctgggacctggattgggtcagatgcctgtccttggaggggacaaggttgactgcttaggaggcgcgacgcacagggctgccaggcctggcccctctctgggaaggttgagagctgagacgg

SEQ ID NO: 170 - DNA, 390 bp, Homo sapiens
tgttggagcgcagggacctgtggcggcgggaggccgaggcccgcaagcagagccagccggaccctgccatgcccccaggccacacgcgcatgcctgagaaccagcggctggaaacactgaccaagctgctccagagccagagccagctgctgcgtgagctggtactgctgcctgctggggcagactcactgagagcccagagccaccgtgctgagctggaccggaagctggtgcaggtagaggaggccatcaagatcttttctcggcccaaagtcttcgtgaagatggacgactgagcccctttgggggacagtggcaaggagctccatgctgaggatcgccacatggctgcaaaggacagggttggacccaatcccagagcagaggtct

SEQ ID NO: 171 - DNA, 531 bp, Homo sapiens
caaagtcatctgaacttccgtttccccagggcctccagctgccctcagacactgatgtctgtccccaggtgctctctgcccctcatgcccctctcaccggcccagtgccccgactctccaggctttatcaaggtgctaaggcccgggtgggcagctcctcgtctcagagccctcctccggcctggtgctgcctttacaaacacctgcaggagaagggccacggaagccccaggctttagagccctcagcaggtctggggagctagagcaaaggagggacctcaggccttccgtttcttcttccagggtggggtggcctggtgttcccctagccttccaaacccaggtggcctgcccttctccccagagggaggcggcctccgcccattggtgctcatgcagactctggggctgaggtgccccggggggtgatctctggtgctcacagccgagggagccgtggctccatggccagatgacggaaacagggtctgaccaagtgccaggaagacctgtgctataaaccaccctg

SEQ ID NO: 172 - DNA, 528 bp, Homo sapiens
tttagcagtgcctgtgacgcattcctgtgctgacctggattcttccaatatgctgaacacttcctctaaaagagccccaggagtccatctggaggctgaccccaaaggaatgaatgaagtaaaatgctactcaaaagccctctccacaggatctcctctaggcattgattaagattaagtgtgatcattgtactgatggatatattttgtgtacatgtttctcttttagttgtaactattgattttgtaatgaaaatttcctctcctttttctaccatatctctgtttttttagaactactcaactgtgtggtaacagaaagcttcttaccaatttccccaactatgttgcacatcagcctcattttccccctttattggaatgcatgttttcattgccttctcctttcaaagtgtacgtttgtgtgttcatcaccttaaattatcttaatttgagacttttttataatggtttcgtaatgtgaaatcaaatactaatttaaactctggagcccataatatctacata

SEQ ID NO: 173 - DNA, 539 bp, Homo sapiens
aaaatactggacccacttctttcagaagagatgaagataccttatatgccctaaagttaataccagcagtcatattttatcagatgtaaatctggatgtaagctcttaatgttatactaaggcagtttcttaggctgtgacacttctttgtggtacttgttttgtgtgaaaggtaaattttggggagaaaacaatgtgaaaaacagaacttgttctgttgtttttggcatactgtttatgttagatacactgtgttacaatacaatattacgaagatctgcattgtattttggaatttggtttcctttcagaattattgctctggctagcattggaaacaacaacaacaacaaaacccaaaggaaccctttgcagaagattcccttgtaaatggccctgtggcatgcccagtatctgcaatgttctagaatagaagttggcaaacctctctgtttgccaagcctgcagagttgaacatgtccataaatgtatacaatctgaccctgttttttggccctgtttctggacactgtagctga

SEQ ID NO: 174 - DNA, 536 bp, Homo sapiens
cggaactacatgccctaggatataaaaatgatgttatcattatagagtgctcacagaaggaaatgaagtaatataggtgtgagatccagaccaaaagtcatttaacaagtttattcagtgatgaaaacatgggacaaatggactaatataaggcagtgtactaagctgagtagagagataaagtcctgtccagaagatacatgcttcctggcctgattgaggagatggaaaatttttgcaaaaaacaaggtgttgtggtcttccatccagtttcttaagtgctgatgataaaagtgaattagacccaccttgacctggcctacagaagtaaaggagtaaaaataaatgcctcaggcgtgctttttgattcatttgataaacaaagcatcttttatgtggaatataccattctgggtcctgaggataagagagatgagggcattagatcactgacagctgaagatagaagaacatctttggtttgattgtttaaataatatttcaatgcctattctctgcaaggtactatgtttcgt

SEQ ID NO: 175 - DNA, 356 bp, Homo sapiens
  misc_feature (0)...(0): n is c, t, a or g
ttacaaggtttgtctattttcagttctttactttttacatgctgacacatacatancactgcctaaatagatctctttcagaaacaatcctcagataacgcatagcaaaatggagatggagacatgatttctcatgcaacagcttctctaattataccttagaaatgttctcctttttatcatcaaatctgctcaagaagggctttttatagtagaataatatcagtggatgaaaacagcttaacattttaccatgcttaagttttaagaataaaataaaaattggaaataattggccaaaattgaaaggaaaaatttttttaaaatttctctaaatgtaggcctggctgggcttt

SEQ ID NO: 176 - DNA, 517 bp, Homo sapiens
tcaagaggtcatttgttccccatagcagcatatctcatttttaaattgaagcgaattaaataggattttactactcaacattcattatactgttaatctttgctgaaatatatgctaacaaatgttaagcaagggaaactgaagacttagtcatgtggattgttagcagtgatctgcattctgtaaaagaggtactttcccatgatgtaggcatgaagtggtgccagtaagcgtagagcggaaatgttgactttagttaacattgggtttagcatttccagtgcagcattatcagtgggcctttaaaaatacttcgtaagtacattagctttcactttgttgttaaattatagcagactcattatagagaacaagtttgccttgattttgtttaaaatgacttctgctaagcacccagaagataaaattgacatatttttataatataagcatactttttttgtacattgtgttcattcttgaataaaatgagttctgtgttggcttgtagatacta

SEQ ID NO: 177 - DNA, 438 bp, Homo sapiens
  misc_feature (0)...(0): n is c, t, a or g
gcaccctgcggtttgcagggggctcctgcctggctccctgctccacacctcctctgtggctcaaggcttcctggatacctcacccccatcccacccataattcttacccagagcatggggttggggcggaaacctggagagagggacatagcccctcgccacggctagagaatctggtggtgtccaaaatgtctgtccaggtgtgggcaggtgggcaggcaccaaggccctctggacctttcatagcagcagaaaaggcagagcctggggcagggcagggccaggaatgctttggggacaccgaggggactgccccccnacccccaccatggtgctattctggggctggggcagtcttttcctggcttncctctggccagctcctggcctctggtagagtgagacttcagacgttctgatgccttccggatgtcatct

SEQ ID NO: 178 - DNA, 193 bp, Homo sapiens
aataaaactgtgatctcgtctagagaaaatgtattcatattacaaactgctcttccatatttatgtaccatattatacctttttattattgttataattattatgggtatttctaattaatatgatgttgaaacctgtttggcaccttctggaagctaccaaaaaaatgacactccattgaagtgcttaaaag

SEQ ID NO: 179 - DNA, 259 bp, Homo sapiens
gtctacttaagacttctggtcatttccaacttatagaggaagggagtctctaaaatctcttcttcagaaggcacctcacttctcagacttaaaattccacatcaagtgttccattaaaagaagataaggcattctgagtgcaaacaaatgggggcttcttaaactacacaccagcagtcagtgaggaaaactttgaacaattattgagttgctttcttgggtctctataatcaataacctgtctgcagatatctatcta

SEQ ID NO: 180 - DNA, 190 bp, Homo sapiens
gtgagagagaaaggtgctggcataggatctgcccagaagagaaaatgacccatgcgcagttgggctctggatacggcgctgtctatagcaagttggccagtctggcctcctgttcctctgctggacctggggtaggctgcaggggtgggcagaagcccctcttaaattgtggttgccatggtaccgaggg

SEQ ID NO: 181 - DNA, 551 bp, Homo sapiens
gactgttgttggttatctggtgtggagtaagtgcacttagcatgctgacttgctcatcagttttgcacagtggcaattttgggactgatttagaacagaaactccattggaaccccgaggacaaaggttatgtgcttcacatgatcactactgcagcagaatggtctatgtcattttccttctttggttttttcctgacttacattcgtgattttcagaaaatttctttacgggtggaagccaatttacatggattaaccctctatgacactgcaccttgccctattaacaatgaacgaacacggctactttccagagatatttgatgaaaggataaaatatttctgtaatgattatgattctcagggattggggaaaggttcacagaagttgcttattcttctctgaaattttcaaccacttaatcaaggctgacagtaacactgatgaatgctgataatcaggaaacatgaaagaagccatttgatagattattctaaaggatatcatcaagaagactattaaaaacacctatgcctatacttttttat

SEQ ID NO: 182 - DNA, 512 bp, Homo sapiens
aagacattccactattatgcgtaatgctcagctttttgtaaagaaatatttaattgtattttgtgtttatacaggtatttcacacaataatttgttcttaatgcagccactataacttgataagtcattgcactatttaaaaagttttagtaatatcatgaatttaatttgcttaagatttagtacatttcagaacttttgaacttttgacaaattgcattgggaaaagaagtctgttaatagtgatttagtctccccgcctcattcccacccccaacaaagcactatcattttcatttggaatgggtattttctgtttcatgatgtattttcaaatagagttcaggatctgcaattcagttcaacacaagtttgttgagctttaaaatgtatttgaagtaatatttaaataggcatttaaaatttcaaattagatgttaaatttatgcatagtaattttgcactgtaaaataattcccttctcccattccttgtctgccattctgaatatg

SEQ ID NO: 183 - DNA, 481 bp, Homo sapiens
  misc_feature (0)...(0): n is c, t, a or g
cagagatctgtggggaagctccgcccagccacactccttgggataatactagccggttctgcctgattccttttccccnggagccagcctagggggcccgggactcctctagtgagccttgactgttaggtaagagacaggaagcagacaagccaagaggttgctgcagctgcccccaggaggaaacgggcagcagggagtgtggcccagcccccnnactgtacccctccaggggcccgagcccttgccagcccaatgacaccttgaagtcaccacttttcctttcttgcccgctaataaaacctatttaaacaggaaattcataccaaatgcaaatgggttttgttttccttggcattttgttgttccgatcacagatttccctgccagggtgtctgtggttatcagctgcaggctcagcttggggcggccgcttcacacaagccactctgtaccacgtgccctaccttagtgacgggag

SEQ ID NO: 184 - DNA, 406 bp, Homo sapiens
cctctggatattgatgcctcgggtgtggttggactgtcatttagtggacaccgaatccagagtgccactgtgctcctcaacgaggacgtcagtgatgagaagactgctgaggctgcgatgcagcgcctcaaagcggccaacattccagagcataacaccattggcttcatgtttgcatgcgttggcaggggctttcagtattacagagccaaggggaatgttgaggctgatgcatttagaaagttttttcctagtgttcccttattcggcttctttggaaatggagaaattggatgtgatcggatagtcactgggaactttatattgaggaaatgtaatgaggtaaaagatgatgatctgtttcatagctatacaacaataatggcactcatacatctggggtcat

SEQ ID NO: 185 - DNA, 461 bp, Homo sapiens
  misc_feature (0)...(0): n is c, t, a or g
gcaccttacatatttgatgctcaggaagaaagtgcaagaagatccctaatagaacattaaagattcttaaaagtttttgaagtaggctgcttggggtgaccagccccacccttacatctccatagttggtacagttagcttgtagcagctgaagctgatgcctggagatcactgtctgttggtctgatctcagtatcatactgagacacctcccctgagccttacctacttaaattggtaaccgtcctaccaaaatttgtcaattttaatcaagtgaggcaagttgcaagggagccagagatacgtgaaaaaagaaaagcagaaatactgatactttctaagaaagaagttgtaataatttctttggcacattgacttactgatatcttttgaaatgcatagangactcttgtgaaccaaagagagcagtagtggttattccccggcgcaataaaaatgcc

SEQ ID NO: 186 - DNA, 514 bp, Homo sapiens
  misc_feature (0)...(0): n is c, t, a or g
ttcccttcagtcttaaattgtctccagcgatgggaagaggccaggnactgtaacccttgtgctgtgtattctctgagcctctgctcactctcagggccaagcagctcccaagccggggccctctcttggccaaaatctgaggagcagtctaggttacaggctttttggtaggtaggttctggctgcctgttaatgcagttaggccccctgattaggtacagtgagaaacaagctagaacaaccctggcccagaagactgtccactccagcaagatccagggatgatagccttgcagggccactgggagtttgtgcccaagcttctccctcttctctccccagggggcactgggactggtccctgccctcatccttagcctgggccttccccagaggtattaaagagaagtatgattcctctgtcttcagttcttttcaggggcatcctgcccatagtacccagttcccaaggggcccccagtcacgtggtgaagcctagcactcatgcagctct

SEQ ID NO: 187 - DNA, 536 bp, Homo sapiens
  misc_feature (0)...(0): n is c, t, a or g
agtgggggggtggtcagtggaagctggggaggcttcactcagctcaaccctgcagaccccccatatgagaacccccctcctcccaccagctgggggagatgacatcactgctctctccatggggagggggctcacagggcaccaagttcgggatcctaggactggcaggacctgctggagcctgagatgggccccaggggcctgaggttgcctcctcctgtccagacccagccttggcacctcccaagactgccaagggccctaccatggccccacagcccccagggctggcagttccatctaggagggtgcctctaggccccactctcaggctaggatggagaggcagatctgggcctggngaggtgacctgcttctggaggggcagggccgcacccgagagcagggacaggtgcccgaacacagggtctccaggacgtagcgcccccccgcatacttgaatgtatgtgcgtatttattgctcacgtctgtgccatgttgtcaatgggtcctttccaacccaagaggtacatttg

SEQ ID NO: 188 - DNA, 498 bp, Homo sapiens
  misc_feature (0)...(0): n is c, t, a or g
aggagacggacctgtgagtctgaccnngagncggncccnttcaccttggctgggcctggtcctggtccttaggttttgtcaggttgtccttgtttggatccctcaactaggtgataagcactggagggggatgacccgccttggacgtgtttctttaacctcatccatataatagggccgtgggatggttgtagaggtaaagcaggatgatggtgttttaagaccagagcttgggaccagggctcctacacctaattttctctcctggtagctgaacaaaggtctaaattagcttaacaaaagaacaggctgccgtcagccagagttctgaaggccatgctttcagtttcccttgttgacaattgctctccagttcctatgaaagcacagagccttagggggcctggccacagaacacaaccatcttaggcctgagctgtgaacagcagggggttgtgtgtctgttctgtttctctgcttgccgaactttctcaataa

SEQ ID NO: 189 - DNA, 544 bp, Homo sapiens
  misc_feature (0)...(0): n is c, t, a or g
ggtagtttctgaacctattgacattgttcaaaatggatcatgtgccatattttgttagttgacatctgagttttcagtaaaatgattatggaattaatcagcaaatgtagaagaatatattcaaagttaaaattcagtggcagcacagattatttttatcagagctgtaaagaaaacaactgtccttttnctccccaccacccctcctgccccactttggcccagaaaccaaatgtgaacttcctgtctcccacctcagcactagtccatgccaggacaccagctgacaatttcttggttttactgtcaataattgtaccatgtgatcaattactgtcctcacttagaacaaagcctgagtccgagaatatttatattttaccaatatatgcctgttacaagagaaggaaatatgagttatttaagtttaacttttttatgtgaattcagagtttatttatcgagggaaatatgtacaaagaagcttcaaatggaatatttaccgacattccttatacatgacagacacttggctacatgggaa

SEQ ID NO: 190 - DNA, 507 bp, Homo sapiens
ccagccggagtcgggcatcaagcgactgtttagcttcttctcccgagataagaagcgcctggccaacacacagagaaacgtgcacatccaggagtcctttggacagtgggcaaacacccaccgcgatgacggttacacagagcaaggacaggaagccctgcagcatctgtgaccttggcccatctccaccctccaacctggactgcccgccaccagcgcctgcaaccgaactgcagcccaggggtcattgctgcctcaagcctctcggtgcagatgcaccctgaaaactgacccctcaaacagactgtctgatttgaggatggacattgaaaaactgacgccaaactctaaagaaatgtttatttatacccagggctatcactgtttctaatagatgactctgatcccgtaggatatatatttaataatcccacaaacggaggccagacttctgcgttaacttcagtaacacaagcttctttaagccaaatacatcacttgccacta

SEQ ID NO: 191 - DNA, 229 bp, Homo sapiens
ctggccccgagcttagggatgtgcttgcaaacccttctcaagggtctcacaaccccaacatcttcagactggcctgacctgggccttgtcttccagttcctttctcccattcccagcctcatttcttaaatgactaggaattttttaatggaccatcatagggagggggtgctcctcttttcccaccaggttgaggtgggggccttgcatcgggggtccccagggtatg

SEQ ID NO: 192 - DNA, 541 bp, Homo sapiens
cttcctcgcagcaagcggctggagatagagaagagcttactggtgcgagcgtccgtcgaccccgtcgccgctgacctagagatggcagccggtctcaccgacatatttcagcatgatacatactgtggtgatgtctggaacaccaacaaacgccagaatggcagactcatgtggctctatctcaaatactgggaactcgttgtcgaactgaagaagtttaagagagtagaggaagccatactagaaaagtaagacaagagtgaaatcaaactgcttttagtgactcgaggccaggcagtcatgcgccttctgggtctccggcgtcttccgttcccgtgctgcccgtgtcatggccacaccgtcacccttcagcagcgacctccactcccgccaccgtctgagcagaagtgcaccgaagcctcagagacagagggtctcctcccgatgctctgccgctgttggggatatggtttcttgaagcatttttaggctgccagtattgtattaagcagaacagtataacctcgtattttagctccag

SEQ ID NO: 193 - DNA, 467 bp, Homo sapiens
ttaaccagcaagtttctgctttttaaggttacttttagaataaatcatcagggaaacagagaggatgctttgctttgggttgtagtcaaaaactgattaaataatttaatgtctctggcacacactaaaaaccatacacttcagttgtgatctcagtggcatatttatttggttaggtttcgttacatttattattacagatgttcagttgaccaagtagttcagtgttttctttcctttttttggaaattttagtttgagtttgtgactgcagtgttcaagaactcagcatccttgttttctacaaatactgattaaaataaaatgctgtaaaatgtgatgtaaaacattatcatgatcttcccatgcctttgttgtacttgtgccgaagtgttttgatattcctttgtctggaagaaaatgtttgctttcattttgatcattttgttcaccttggaatcaacagg

SEQ ID NO: 194 - DNA, 360 bp, Homo sapiens
aaaggattttgtggagtcgccccaggcctgacggcgttaattatccctggctttcatcttgatgctcttgcaggggaggctcaagatgccttgtggctcgacccctgcacggagcccccagcccagcctccccgtgggttgaaaccttgatctgggcctgactgtggctgctctggggacatgccctcgtcctttgctgaagctgaggctccagagggggagtcactgccacgaaggttgcccagaactttccttgctgcaaaaagccccaagacttctccctgccacacacacagcttttgccatcgcgttctaaaagctgacagctttctctccaacactgttctccctgagtagggt

SEQ ID NO: 195 - DNA, 236 bp, Homo sapiens
ggaggcctgaatacaggcggtcacctaaggtggtgcgtacagtgttgggccacatgtctagtggtgccaggactgagagatcacttacctccaccggttacccaggaggtaacagagactgatccacaatgttcctgaggtgtcttgggcacccataggcaggtgacttctggcttagggcagggttcaggaggctgggcactcacagtttctctttggtccccacagaacatgtt

SEQ ID NO: 196 - DNA, 297 bp, Homo sapiens
gtttgggttgtggaagcctatggtattcttggctattgcagctgtggctctgtatgtgttacccaacatgcgacagcaggagtcagagttctgcctcatggagtgatggcagaccttggccagcgcgagggcagatccccagtggccaccaccctcagctttgggcaggacacactgtgccagaaccctccccatatgttccatgtgtccccatctcctcagcctcagtcacccaggctgaaaaggcttgtggggagcggctgacttccatctcctgccttgtgtaagaacctgagt

SEQ ID NO: 197 - DNA, 517 bp, Homo sapiens
  misc_feature (0)...(0): n is c, t, a or g
tagcattagctttacttggagggganaagaaacaaaattacaccttaaantctattagatagactacaaaatggatttgatgtattcttacttttccaaagaattttttccacctggaataagaagagaggactagttganacatttgagctggagaggcttatgggcaatatgaagtgggccaaattcttgcaatacaccctattcaattgaaagtacagtgtctaaggataagaatacttctttaaagaccaacaattgttttaatgcaatcttaattagtaaatggtttacattttttctattgttattggttttaaaatttgctaccctgaattctgaaatattataagagttaataccaaaaatacttttaatgtctgacatctcttacatttcacatggttctttttattcattgtaaataaaagtaaacttggataaatttgagaataaactttgaattgttgcaaactatgattatcaatttgtaaatttaccctttgacataataatg

SEQ ID NO: 198 - DNA, 517 bp, Homo sapiens
agtgccatgtaattgtagcttgctagtgtttaatgtttaatagactggttctgtaggtgttttaaccatttaacactctctgccatccctggagaaagtggttctactcttactgaacacattctctctgacaaaatcaccagctgctttatttttctatttattacagttaaacagttgatgaggtctgaatcttgaccaaaactgctcagctgagatgtttttcacaatagacactgtacaaagtgtgcgtgcaaaaggacacggttggtagtattttttcattaatgtgaacattgactaaaaaaaagcagtcctgccttttaaatcttgtggcagctcagaagggaggtgcttaagaaccttaactactatgtcagataacaaaatatttttttccattttggagattggttactgctcacacatgatgtatagggctaaatatatgcttgtttccttgcacctgtgtacttcccctctctccctccctttccttcccctgtaggcaataaat

SEQ ID NO: 199 - DNA, 485 bp, Homo sapiens
tcctcatttaactttacaaccttgcgaagtgggtccaggagatttggagtttgtggtaaagccagtaatgggcattgtcctgcattcccttcccttcatggtttgcctcgatcctctctaagcttctatcctggcctgaataactcaaagataattggtctcagagatcaagccatatcctcaggccttatttccatcttctcatgattctgccatcatacctttgcttctccgctaatgaaatgagctggcaagacctctgttcattgtgaagtgcttctgaaagagcctaagaaaaaaggctcatctgaaagaaatggagaactctatttcgaaccaagcctgtttgaatgtgtgttagtctgatctttgatcatgtgtttccatgtaatgggagtctcgttttttataatgtttctaacgttttattgaaaaacctatggccctccttctttctcaatagctactttcttactgctttttga

SEQ ID NO: 200 - DNA, 469 bp, Homo sapiens
ggacacccagtagaccctgaatttcactctctctaaaaggttctgagggctcatcctgggccaggggccctcctgtgcactgttagctatggccacgggagcctccagagctgcctggtagcttcaggttgacctgcttatcaggcctacgatccttctgatttaagtacagctggaaagtattatctaattaagttcatgatagtgcttttggagaacttgtcaaattacagccaatgagaaaataaggacctagcataccgtggagaaccattaaaaatttgagaagaaacaacaagtattatgtcaacttacttcaaaggcgtagttttgggaatttgatgcagtaaagattaccctgttttatgattgttccttgaaagtcaaatgggggacctgtccattgtgctctattaatcttgtcagaaaactgtcaccaaaacaaaatttgagtttgtccttgttctag

SEQ ID NO: 201 - DNA, 474 bp, Homo sapiens
aactcactcattgtcaggtgtccgtggagtgtttttggcatggtgacctgtctgggcccagcatgttgcagatgtgtatttatgcgcaatggtatgcatatctctgtgtgactgtcagtgttgcaagctggctggatccaaccatctcttctgaaataatgcatccaaagggttgatattctgggggaggtcactgcagaaggatggaactgacctttattccccagtgggcagttactgagctttcctcctcagagccatgctggcagccctgggacagagaacggtgtggctttggctgcctctgcatggaatcttgccccggactcctgaagactgcacaaggaatgaggaagatcagggacaacctgggaactgaataactttcaaagccagtgctcagcttctctgctccgtactagcgtttacaggtcttaattcaaaccagatgcctgtactagtttttagacccca

SEQ ID NO: 202 - DNA, 476 bp, Homo sapiens
acatctgctagaaccttttgccttaactattcaccaatatatgctaatattcataaatatggattgactgtttacaaacattagaatcttgtcttggttccattttgatggctaatatttgttatcttaattaagactatttctgaggtcatgattacttgaaaatattgactaaaactgggtccttagaaattccaggtggagctgatttacctatgactgaggggaaaaaaaaatcaaattttactgataatagtaatgctccaaatgaattaatgacacatctgttcaataaataaagagcttaaatatacaaaacataagaaatctgggcaacaaaacttgtggtctttacttttgaatagctacccaagaaaaggttttaaaggtaaaagttatgagtaatgtcatcacaataagctcttgtttaaaattcttttcttttatgtataattaggtttatgtttcatgtcttt

SEQ ID NO: 203 - DNA, 518 bp, Homo sapiens
  misc_feature (0)...(0): n is c, t, a or g
tcttcaccctacaacatctatgttaggtagaaaagtatgtggatttttaaaaatcatctggtataaagagtttttaagaactatcttcatcatctntagtatcagatngtgcttgagaagttaggtacaatgtaatgtgattcattgctaaaaacaaaatgcctcccacaattgcagactcactcattttaccaaactatggaatttgtcaacaccttttcttgggaccaaggaagcaaagtcagtggataccgtgtcctgtagacatgtcacttgtgataaggcacggacaacatgaactggcaaaaacattggcatttggtcaaatgcttatgagctaaggatagaagggaaaaaatagttgtgtgaatgattttacctcttagttcttacgaaggatggttatcgggctggaaaaatgtttattggactgatgctttggagcctctcaatgaatgtaataaaaaaaatgtgtagtgagcacaaatgtatggatttgcagcacaatccaactttga

SEQ ID NO: 204 - DNA, 275 bp, Homo sapiens; identical to SEQ ID NO: 13
  misc_feature (0)...(0): n is c, t, a or g

SEQ ID NO: 205 - DNA, 567 bp, Homo sapiens
  misc_feature (0)...(0): n is c, t, a or g
gagttcatgtgtctaatcattatctgtggtttgggggncnccattncattaaaatgaatgagtcactaagtgagtcactgtanataaaatacttggaaattgtaaagtaatatncaaaagatattaacaaagtattattcatggtaaacaaatcacatcagtagcaaacacagggtgggaactcaatcttatgttatagcttactcttaagaagaatatgtgaagccaggaacatggttaaaggtacagaccagaaaatttctgacatgtgataaatatttcagtgacttttcagatttatttcttgttagccgctgtgtctatttggtgctacaaaaactgaaagaaacaaaatccctgatgtaagggcttataataaatacacagtttggagatgaactaaggatattttacatttacgggaaaggattggacaatagtatcattttctcaccatttgcatgtacatcatgtctttccaattgttttcattatttttctgaaagagctgcaaaattgtgcagtggttcaacctgaccaaagtggtattatgctgctgggaagtaa

SEQ ID NO: 206 - DNA, 217 bp, Homo sapiens
gcctgcgtaagtgaggaaacagctgatcctgctcctgtggcctccagcctcagcgaccgaccagtgacaatgacaggagctcccaggccttgggacgcgcccccacccagcaccccccaggcggccggcagcacctgccctgggttctaagtactggacaccagccagggcggcagggcagtgccacggctggctgcagcgtcaagagagtttgtaa

SEQ ID NO: 207 - DNA, 480 bp, Homo sapiens
  misc_feature (0)...(0): n is c, t, a or g
aacggaatacctgctaggttccaggaatgagctcacctaacaganagcaaatgtgtctggttagatctcagcagagcccattctgcaagacctggctgagccagatgagagggtgggccctgtgctggggggnccttgggtcacacacaggaaccgagacctggcttccaccccccagtcacccacttgggttatctgctggaagttatcgataggactgtgtggccaaccaagtgcttgtgagatcactgacactgcaaaaacaaagcaaactgctccgggtaccaggacttcctccaacctggcaagggtgtgcgctgaggcggggcttgcaggtgagggggctgtatgcttcaggaactaactaaatgcatgcagaaggtaagaggcatgatgggaggtgttcaagcacagcaatcccatttgggagttattttgatactgcgatgagtaagggtaagggcgcatggaatggggcta

SEQ ID NO: 208 - DNA, 421 bp, Homo sapiens
aggagttggtggagctgatagagaaaatggtgcagtgcaacgaaggggcttacttttctgatgacatatacaaggacacagaggaaaggctgaaacaacgggaagaggttttgaggaaaatctacactgaccaattaaatgaagaaattaaactagtagaagaggataagcataaatcagaggaagaaaaggagaaagaaattaaattactaaaattaaaatatgatgaaaaaataaaaaatataagggaagaagctgagagaaatatatttaaagatgtttttaataggatttggaagatgctttcagaaatatggcataggtttttgtcgaaatgtaagttttattcttcctaatttactgtgatttgttaatggatgaattgtattttgcaaagatagttagagaaatacctccttcc

SEQ ID NO: 209 - DNA, 503 bp, Homo sapiens
  misc_feature (0)...(0): n is c, t, a or g
gggagaaacacatttactccccaataattgtacgggaggtgatcgaggaagaagaaccaagtgaaaaatcagaggccanctacatgaccatgcacccagtttggccttctctgaggtcagatcggaacaactcacttgaaaaaaagtcaggtgggggaatgccaaaaacacagcaagccttttgagaagaatggagagtcccttcatctcagcagcggtggagactctctcctgtgtgtgtcctgggccactctaccagtgatttcagactcccgctctcccagctgtcctcctgtctcattgtttggtcaatacactgaagatggagaatttggagcctggcagagagactggacagctctggaggaacaggcctgctgaggggaggggagcatggacttggcctctggagtgggacactggccctgggaaccaggctgagctgagtggcctcaaaccccccgttggatcagaccctcctgtgggcagggttcttagtggat

SEQ ID NO: 210 - DNA, 530 bp, Homo sapiens; identical to SEQ ID NO: 14
  misc_feature (0)...(0): n is c, t, a or g

SEQ ID NO: 211 - DNA, 488 bp, Homo sapiens
aaccaatacacaaaattttcctatgtcagaatgtggtggagcataatagattgtatttggtgtgcttgcgattttttttttccatagaatttattaagtgaagtttctaaaactttgcttctcctgatcccggtgaagtgtacatcataagaatccatagtactttgaagtaccattgcaccaagatgtctgactgaattcatagtcacacttttatttgaaagaaagaattgttgtagttttttttcattattctaaaactcttgttgttagatacaagatttaattaagatctaagctcctgcttatttaatgtaattctaaggtaccattttagaaaaaacatttgttttaagattccaagaaacctgtgagttaatactatatttaaaagagaattggtaaattttgaatgtgtgtaatattttggaacctgtttaaaaaccaaatatacctgcaaatagatacagcctatcctatactattta

SEQ ID NO: 212 - DNA, 460 bp, Homo sapiens
tatgtcctcagttttacttctaccaaaacatccctgtatgtgtgtgcatgtatgttggcgtgtgtgtgtgtgcatgcatattagtaaatgtgtgtttgcatgtgtgtgttggggagtgtatgtgatctgggtgtttgtttatctctgttattattcccctttagctttattttagtcaactctacattatgatgaatttcaaaatgaagctgtattaaaataattgtaatataacaattcaatctcacatgttactgcagatagttaacttttgctgcaatctattgtacatttgcaattttctgtgttagtaaacttagcagaatctggttatttatttttgtgtaggcttaatgttcactgaaagataagtcaattactgttagtaaaaaattaaggtactctcactgcagagatttaaggcctgggcctaatgtgctgtattatgaagccttgtgac

SEQ ID NO: 213 - DNA, 474 bp, Homo sapiens
gaaatggtggtttccttctgataagggatacagtggaccatgtcgcttatatatcaccctactaggggatataattttcccttctaagcaagggaaatggcagtgctaaatagttttgtaaagtttttgaatgagaagcttttaggtaaagataaactgtcataatatttttcagatgcatttgcattgactatgggagaaaaattagggggaaatgacagtcatggtgtttttttttaattttaaggactgaaattctgttacatgatgtatgacaatataaaaacatacttagttttatactaaatctttttttaaggtcttggcatttaatataaagcaaattcacacgttttctaactttccataagttccaaaaagggaaagaagaaacctcagtcttgaaattttgatttttaaaaatcatgacactgttttaccatgaaattgagtagctaacttttggtaacacct

SEQ ID NO: 214 - DNA, 351 bp, Homo sapiens; identical to SEQ ID NO: 15
  misc_feature (0)...(0): n is c, t, a or g

SEQ ID NO: 215 - DNA, 471 bp, Homo sapiens; identical to SEQ ID NO: 16
  misc_feature (0)...(0): n is c, t, a or g

SEQ ID NO: 216 - DNA, 553 bp, Homo sapiens
  misc_feature (0)...(0): n is c, t, a or g
aaaggcccactgataatgctgcactggaaatgctaaacccaatgttaactaaagtcaanatttnccgctctacgcttactggcaccacttcatgcctacatcatgggaaagtacctcttttacagaatgcagatcactgctaacaatccacatgactaagtcttcagtttcccttgcttaacatttgttagcatatatttcagcaaagattaacagtataatgaatgttgagtagtaaaatcctatttaattcgcttcaatttaaaaatgagatatgctgctatggggaacaaatgacctcttgagatttacaaccccctttataaaagtgggaaagctgcctccctaaaaaaaattatgtccaaggttaataccgtatctttttttgtagttttcttatttcttgattttattggcacctcccaggcactttggcatgtgctcctgtataaagtgtagttactgtgcctgtagagttagtggcagctgcagagtagttataggctgacaagtccacttttggcttaccatggagatctgctccaacacatgc

SEQ ID NO: 217 - DNA, 439 bp, Homo sapiens
  misc_feature (0)...(0): n is c, t, a or g
cctgtgatgatagcttcttcccatgtggggattaagggtagggagtggggggaatggtccaaacccggaaggagctaatggagaggatagggccaaagtgggacagggcttggatggtagaggatggggtccaggaggaagaggagtctagcaatccaagcgcaggggtcagtgctccgagtcccagggctcagaaccagcagggcgaccacatgagcgagcccagcgccgccccagtggcggntcccgcaagcatgcccatggccagaggggcgccggcgctgtagcagggatcctcccgcactatcacgtgcgtcacgccagggcctgcgtagggcggtccgtagtagctgcggacatacgtggcctcgtgtgcattggggggcaccacctcgtagtagtcttggtacgggctgtagacgcgcaccggggtggagtt

SEQ ID NO: 218 - DNA, 434 bp, Homo sapiens
  misc_feature (0)...(0): n is c, t, a or g
tcccctagtgaaatccatctgtcctgaagggaaccctgggacggggtcaaggaaaccctgttcacccccaccacggggtcaggtcttcaccaaagggaggccgcacggattcccagtcgcaaacccaaagccttgctgcctttgcctctgcttnccatagttgtttcaatgtcttttttaaaaatcacatacactcgagtaagactgagtctcctcaccgaagagatctggctgtatcccgagtctctgaaacctttgctccagtccngtgggancgtgccgtcccgaggatgtggagccgcaagggctcgccagagggatctcaggagctaggcctcaaggagcgctgttgagtgacaggtctgatgcagtagcttttactattggtggaaatcgatgttttttccttgaaagtctacctttctaagttcagt

SEQ ID NO: 219 - DNA, 318 bp, Homo sapiens
gagccataaaattgaagccagtagcttgaacaatatggaggccttcttactgtagggaagaggtgtctagcttagaaggatcacatttgatctagatgagattacccatagcagggaaaatgaatcatcacctaccaaagactgtacggaaaggtgtgttattttcaaaattgcattttagtttgcacacatgtaaatgattattctatgttaatctaattgacaattcagttagctccgcatcctaagacttaaaactagcaattcctatgcaaatcatctgcttaactgaactacaaacgtttttcattaattcat

SEQ ID NO: 220 - DNA, 463 bp, Homo sapiens
gaaggctatgagttgctgctggccccatcataatcttttttgtttagcagaagtcaggaaacgaatactggtacacttacatttcttggaagagcagcagaaaccttgggatatccttgtgggtcaaggaggcaactctcctcacggattccctgatttgataacaacatactcatggaaacaccaatccaagttttcacaagtttctcttaaagttaacttaagacttcctagaccaagaattcctaccacgcaaggcctgtgaaaatattgtaaacttaatatccgacagggagatattcaaagatgccaaagtacctgtttttataaatattaccacatggtttaagatttgacttctcacataaaatgagtaaaaataacaatgatttttctgcagtaccttaatgatgctgtaattatgaagcagggttttaaaattctgccatgtagtgccttattt

SEQ ID NO: 221 - DNA, 442 bp, Homo sapiens
  misc_feature (0)...(0): n is c, t, a or g
atttttcttagctaaatctggcaactgtgnctatttcattgaaaacctgaaagtgtacaaagaaggaagaagcagaatctgccatatgagtaatagaagtgagcaggcccaggactccctaagtcaagaaaccaagaggcgtcattacggaaaagagtaactcaccctgtgtgctccttggtagttctccctcagcgatgcccccatgttatgaatggggaaaagttcactgaagggttcatagtgaagaaactttttggatgatttctgttggtgggttttggataccttcaagggatcagaaaataatatacttaggaaattttggtaatgtcatcattactctctacattattattatgacggttacaattgttaaatctaggtggtgggtatgtgggttatattgtacatgatttttaacttgtctgcatgtttgaaa

SEQ ID NO: 222 - DNA, 569 bp, Homo sapiens
caacccaaagtctgaatttcttgaggaaaaggtcaatgtcttttcatctctgtattgttccccacctcttaacacagtgcctggcacatactaggtgctcaataaatgtctgttgaatagaattattaataatttaagagtaggaaaaaggagtgtcagagagagactcaaagatgagtgagagagcatggaagatggctgtttcatgtgagacaggaatggaagaagttatgaatagggatcagatgggggagtgagaatccctgtaagtaaaatgtgaggaaaagaacaagctgagaacaagattctcctgtcaaaaaggcgtcttactgtaaatagtccaaggtgacatttgttagttttgaatactgcttttgggtttctttttttcatttttatattttaaaatttttatcaaagaacaaagacttatgtagttttcttttattctacacaatccaaattaaacagcttttggtgatgcaattgtacactttcttaagaatatatctaataccacattttagcagaaccaagcaatgactgacattattcattgggatctggcc

SEQ ID NO: 223 - DNA, 459 bp, Homo sapiens
  misc_feature (0)...(0): n is c, t, a or g
cccagcctccaacctaatttgagtttcatttgtatttttttcatcaccttacatgtgttaacagctgtttcaacataaactccattataatctatatacatttaaagaccgtgtttacataatctcttctgggtagaaaatggaaatacttaacctttgcattggtccctttcaggcttgaacaacagtggctgtatctgcatcgtggggttgctggtggtagaacactttggtgttaggaaagtttggaaaagaggatatccctgtattaggccattatgattagagataagcagcctgggagaaacatacaagacctgtggctactggtagagaattggaataagcttccaacaatggactgtagagattaatggagattgtttagtgggcccatggctaggtggggtattaatacagttgaagttatgttncccttggcacagatctttgagaatc

SEQ ID NO: 224 - DNA, 234 bp, Homo sapiens
gggcctctcacaacatggcagttatttgtccccagagcaagcaacaccggagggcaaggaagaagccatgatgttttttgtaacctagcctctgaaagtgtcataccaattctgtattttgttggtcacacagaccaagtcaactacaacgtgggagactcctacacaaggcatgaattctaggaggtgggcatttttaagtgtcatctggaaggaggctgtcacaacctggaa

SEQ ID NO: 225 - DNA, 282 bp, Homo sapiens
ggcctcctcccaaggagaacatgagaccacttcatatctggaactctagaaacactggctgcagcaatcaacctcctgtgccaaggctggccccactcttgtagcatggacactgctagctgggttcaaatcccagctccagcagttgccagcgctgggtgacctcgagcaagtgactactcctcactggattgtaggagaactaaatgtgatagtcattatttacagttcaccacacgctcttcacatccgttacctccctggatcctcaaaataacctca

SEQ ID NO: 226 - DNA, 401 bp, Homo sapiens
aaaacgtgacactttacatatttcatatttttcatatagtctggaggtatacacagttgttttgtttttaaccacggtattgaaacctttaaaaggtaattaagcatttggtcaagtaaatatagaacatttgtataaagaaagaaatgaaattgtgcttaatgttatatactgttattatttgcaggctggttttaattcttaatttgattagcaaagctaaaaaagtggatgttgaagttgaaagttttaaagaggtacaaaatcttacaaggacataaattattatttggttgaaaaatagcctattagatattgtatgtcccttcctctgtacaaattgtaaaatacttaaaataactatgaagaattcatataggaagtgtgatactattgtaaat

SEQ ID NO: 227 - DNA, 503 bp, Homo sapiens
  misc_feature (0)...(0): n is c, t, a or g
gtgattaaacattctagaccaggcttgttgatatgtatgccaatagnctagaatttttggcttagtgtaaaataaaaatgtcttttctattgtggtctgatatccgtttctgtaataagatcagtttgttgtcctctgtgcaccagtggttttgcccttaattttttttggctagcatcaccaagatctgtcatccagagctgctgagaaaaatacatgttgnccaaacttttcttaaaattgtgctgccagtggtattttcccagatgtgaaaaataataatctaataaaggattaatatctaataacaataccattgttgaacatgctcatggaatgtccaccttcttctgattccnttttttgtatttgaaaatgcaatggtgtgttccaaattattgttggtgttgttaatgtcatgactctcctttgaatagaataaaataaccccttttgttttgtgttttctactgaattagattttcctctagtcctatgtgaat

SEQ ID NO: 228 - DNA, 434 bp, Homo sapiens
atagcaaattatgccctaagctgcaatctacgagaagagttggtagctgtctcagagagaaaagacatctgtaatgcaatggggtctaaactgacttgtgaaaagattgtcaaagaacggtatgaaaacatgatgcaacagcagaagttaacaaatatttcaaaacaacaagctgaacagatttcaatactacagactgaagttgaaagattaagaatgaaaacatttcctgctcttgttcaaatgtaaaaacgctggcaggaaaacacaaggccaaatcaatcatttaaaaaatcatttcatttgggtaaaatgatttccttttctttcttactgggaaattgaagtagcatgtcctctgagttgcatgttttagataaaaaattgtttaattttagccttaattgtatacaaatttttgtcctgcatgaata

SEQ ID NO: 229 - DNA, 429 bp, Homo sapiens
ggctgaggaggctggtctgaacatcactcacatttgcctccctccagatagcagtgaagccgagattatagatgaaatcttaaagatcaatgaagataccagagtacatggccttgcccttcagatctctgagaacttgtttagcaacaaagtcctcaatgccttgaaaccagaaaaagatgtggatggagtaacagacataaacctggggaagctggtgcgaggggatgcccatgaatgttttgtttcacctgttgccaaagctgtaattgaacttcttgaaaaatcagtaggtgtcaacctagatggaaagaagattttggtagtgggggcccatgggtctttggaagctgctctacaatgcctgttccagagaaaagggtccatgacaatgagcatccagtggaaaacacgccagcttcaaagcaa

SEQ ID NO: 230 - DNA, 435 bp, Homo sapiens
  misc_feature (0)...(0): n is c, t, a or g
gcacgtccaaggtgatcctgagggctgtggcggacnaaggggacctgcaagtatntgtccctgnncaccctgaagaaggctgtttccaccacgggntacgacatggcccgaaatgcctatcacttcaagcgtgtgctcaaggggctggtggacaagggctcagcaggtgaccggcangggggcctcaggctccttcaccctgggcaagaagcaggcctccaagtccaagctcaaggtcaagaggcaacgacagcagaggtggcgctctgggcagcgcccctttggacagcacaggtcactactgggctccaaacaggggcacaagcggcttatcaagggggttcgaagggtggccaagtgccactgcaattaatgaggcaggccaggcaagcagtcaggggtgccaagancgccattggctcagtgcagtgggaa

SEQ ID NO: 231 - DNA, 525 bp, Homo sapiens
gtgtttttgttgcatctccaagtcagaataaatgccttttggagcagatatatttcatttagcatttagtatcatcttcatcaatactcgtatgaacgaaaaaataaaaagccctctcttattcccactctacaacgcatgtcaaaggtgatctgtttagtttttccttagtatcgaacatatcacagctactcaatgaagtttcttctcaactaaagaaacacagtctcttagagaatttgttcctgtgtttccaccataagataaatgagataaagaataaatttttactaaattggtaaatgcaaaagaatcttttttttattgctcatatgtcttcctgtctctaagccagaccaatgagcaaatacctttaaaactagttgttacatcttgaaccatttaactgtaataaaagcagaatgtttagttaatgaattaaagaacaaaccctgagcccttttatcagtctcctggctttaaactaagccaatgaggaagtgatttgggggattcctgaaacta

SEQ ID NO: 232 - DNA, 384 bp, Homo sapiens
  misc_feature (0)...(0): n is c, t, a or g
caatgcagttgaggcctcctgtatccgaacacgagagctacagtccatggccgaccaagaaaagatctccccagctgcccttaagaagaccctcttagacagagtgaagctggaatcccccacagtctccacactgaccccctccagcccagggaagctcctcacaagaagcctggccctgggaggcaagaaggactaaggcagcatctgtccccntctgtgattcagagccnttagttgagancccctgccgcccctgccacccccctgccccgctcccaccattgcccctcctcagctgtgcaaggagaaagcatgcttaggaagttttcaggtccttgtgataaaacctccttaaatctgttcagaccaagcaatgcgagc

SEQ ID NO: 233 - DNA, 509 bp, Homo sapiens
  misc_feature (0)...(0): n is c, t, a or g
cattgtgccattctagacttacctcctgccactccccaccagctttgttttgtcttagccacacaaaataatctagcgtctctaaccagtcaaacattttaccttgtgccttggctcactctgtgccttttctccagaatatctttctgtgtacttttctcccatccttttacctttaaacctgctgctatggtttgnatgttgtttggcccctccaaaactcangttgtagttcaattgccaatgtaatagtgttgggagatggtacttttaagaggtaattaggttgctaagatggattaacatctttctcttgacactgagactgggttctcctgggaatggttagttcccaagagagtgagttgttataaaacaatgctgcctcttctattttgcgctttttgtttgcacaaactcggtccccttctgtttctctacgatgttttgatgcagcatgaggcagtcatgagaacccaccagatacagctgcctgatcctgaatttcc

SEQ ID NO: 234 - DNA, 441 bp, Homo sapiens
  misc_feature (0)...(0): n is c, t, a or g
ggctcaaataccatacctcagaaaatgaggtttactatggaaatactgaaacagtctttgcagctgtgtgacaagtcactctactacatactgatttggagacctccgctaaatagttttatcactgcagactaaaatgtgggacttgtatcttctttgtttttaatgcacacacatacatgttctgtgcatgtatgtggttactgngtatatgtgtatgagtgttgtatatgcatgtgtgagtgtgtgtctgtatgtgtgtacaactaaagaagctgcagaaactttgtaatactttgtgaaaaggattatattataaaggtttgtactgtctgagtgcacagctactggaataaatttagggaatctcaggaacaagcatanaannnntccaagatttatttcttctcagaagtgtaagtgcagtttttaattctgtat

SEQ ID NO: 235 - DNA, 535 bp, Homo sapiens
  misc_feature (0)...(0): n is c, t, a or g
gaactgcagtggaatcgtccaactatttattgccagttttggttctcctgaaccttatgccaccttaaggggaaaaaaaaatccagtagctggcttgagattccagtgctcacacttgacatggtttccagagaatctggccccaaagtccagaaggctctggttttcataaaaggtgtatttgctgtttattttgtatggtaagtatttgctcttttgaatttaattattactgtcagtgtcagtcttggttgtgtattgcatatactgtatttataaattggtgcaaaaagcacaagtaaattatacatcaaatttattataaagaaatagtaactattttaactttgttcaagtatgtggtaatttgctcctattagagtaaaaaagaaaccagtaaattatcagtttgtgtaacttaagagnnnncnannnnnnnnttttttagatctagatgcataaaattttgaatgtgaaaattgcagggcattttaaaaccatatgtgggggatattttcccatgttctctgttatt

SEQ ID NO: 236 - DNA, 396 bp, Homo sapiens
  misc_feature (0)...(0): n is c, t, a or g
acagcctgcaagcgatatctggcatgattgttcctcctatgtgaaagaattgccttgaagaattgtattaatgaagaggttggattctgctacagagagtaatctgatacaagtcccagagtggaacttttaactcaggcctttttaagaggaatcacaataactgcagatttttaaacaaacaaaatcaccgaccttgcaaatactgaaattggaagagggatctgcaagtgcagggtgttggttaaagttgtacctcccaagtatttgggggatatatttattctgtattgacaaaagcaaatccactttttctttttcttttttttttttnaagcttaattctgcaatcatttgtcttttataaaccgtaaagctctatacaagggacactat

SEQ ID NO: 237 - DNA, 531 bp, Homo sapiens
  misc_feature (0)...(0): n is c, t, a or g
agaaggccgtgactttataacaaagaacaggagttgggtgagcccagtgcactgcacacaagagtcaagaagggagcttcctgagcaagaagtagcccctccgtctggtcagcaagctttacaatngcaacaggaacaaagaaaaagtcttaggaaaagaagttttattattgatgcaagccctaaacactctttcngactccagaggagaagctggcagctctctgtaagaaatatgctgatcttggaaattcacctcttctatagaagagtttgttttgaactatacgatttgaaacaaaattctttttttggagactatggaaacattctcaacagggaaaccctactagactttgtaaagcaaataatggaaaagatacagaactttttgaagaatcatgggaaatttttataattaaataaatgctaaaattctgttttgtgaaacatttatgggaattatcactgacagtttttgtacactttcaaatagtgttaaagcagcaactccatgttgtaaatgcacaa

SEQ ID NO: 238 - DNA, 485 bp, Homo sapiens; identical to SEQ ID NO: 17
  misc_feature (0)...(0): n is c, t, a or g

SEQ ID NO: 239 - DNA, 465 bp, Homo sapiens
  misc_feature (0)...(0): n is c, t, a or g
tcagtatttttattcgccttctagaacttgngatccacacatcacccatttatattagtggtaaaattatctgctaaaatctaattgtaagaaaggcttaccttctgtcatcaagtgattgtatcatcctggatcgtcatttccaaggaactagcctttcttttcctaagcgtctgtatgtgttctaaaacttccagtatatatttatagaacttagaaaaaatgttacattattcagagtagcaagtcttactggagtacctatgtttgttttcttggtttttatttttttttaagtttaaaagtagtaattaaacctatattttgtgattgtttcctggtctgtgtttttaaattcntttccttcagttttcctcatgaagatgtttcagatactgaatttgtttagacattgaatgactttgttaaaggcacaattaatcacattggttgtactctgaagac

SEQ ID NO: 240 - DNA, 500 bp, Homo sapiens
  misc_feature (0)...(0): n is c, t, a or g
cctttcaaacgtttaccagctaatgggcaagnctcaaggncaactgagaaaggggctgcgagtggtaatataaacaccaaagttctctaanatacacaagacctgtaggctatgtgtcttctngtacttcaggtgtgtagtctatntctgacaggttgtgttagtgaattttaagaatggagaggagaatttagggtttgctttttctttgaaagcaaaaataaatgttcatattcttctgatacagtaaaaacccttgaaatgccctaatttagaatagcacctgattaattaagagttaaaagtctaagaaagtttattaaggcgtgcatggccttgggataacaatgaaaccatttgtctactggcatctgtctgctggtttcttgacaccagtgtaatatagaattgtgacgtaaagaaccncaaaatataagagggtttcgtttcattggttttgttttgttctaaggaatgcagtctttcagtcattatctttt

SEQ ID NO: 241 - DNA, 515 bp, Homo sapiens
  misc_feature (0)...(0): n is c, t, a or g
cgatccttggagatcccgtaatcccactacccttctttggctcagagaggataatttgcctaatgatacattaaagttagtggcaaaacttaatttggagcctgatttcctactgacttccaatttagtgctcccccagtatgctaaatagaaagccctctgcaatatattaaatgtatactaaatgtatatatttaataatgtcatgtataaaatatgaataaaatgtccacataggaaattaacacatatataccttctctgataagcactcctcnnatgtgtcctgattatttactttctcttatcttttccttagtgttcctcaaattatatctatcctctaaaccagggatcagcaaactataacccccaggccaaatctagcccactccctgtttttatagataaagatttgttggaacacagccacactcatttgtttacctactatctatgattgttcaaccatgggagagttgagtaattgtgacatggaccataggccctaaaga

SEQ ID NO: 242 - DNA, 432 bp, Homo sapiens
  misc_feature (0)...(0): n is c, t, a or g
gcctctagggtgatggaccagccccnttaaagnacttgactcaactacaggggcctgggaagatgcctgggtcccctaggggccttgccaaggggacctgtcgcaccccaccactccactgggctcgcacaacgccaaggccgccaggagtgttttacatcatgtcctgagcctacctttcccccaaattctggggcccacagcctaggagccaggtgatcaggcctcggctgtggggccagggacaccatggccctggggctactacgtgtccacacatgctccagaccctggggcaaggtaggccaggggcttctgacctgtgcaggtgagagtgggccatacccaggaaagaccattctgtatttttctgtccctgtctccttagaatggaagctttttgagggcaggtccttgtctttgtacgttctg

SEQ ID NO: 243 - DNA, 508 bp, Homo sapiens
  misc_feature (0)...(0): n is c, t, a or g
aaatgtatatatatcctagtcccctaaccaaatcctgacctattgggatacttataaaaatttaagtaagtgggatacacaaagaataataactattaacttttcattattagcaaaaacctaagggatttaaactaattgaaactgtatttgattggacttaattttttatgtttatttagaagataaagatttaaagaagacctttacaataaagagaagaaatatcgaagtcattaaaataaggagacttacttttatgacattctaatactaaaaaatatagaaatatttccttaattctagagaaactagttttactaattttttacaacttcaataataccatcactgacacttacctttattaattagcttctagaaaatagctgctaattaggttaatgaacattttaccttagtgnaaaaaaattaattaaatatgattacaaagttgcacagcataactactgagaggaaagtgattgatctgtttgtaattacttgt

SEQ ID NO: 244 - DNA, 387 bp, Homo sapiens
  misc_feature (0)...(0): n is c, t, a or g
attagagctatatcattttactctgaatgtcttaacatagaagtttacataaaatttacagattggattgatttcagccttcttctggtactttttaaaatcttattaatcattaggaaaagaagttttattattgatgcaagccctaaacactctttcgactccagangagnaagctggcagctctctgtaagaaatatgctgatcttgtgagtatttatttaatggagcaaggaacacagaaaataaaatctatgtgtgcttgataagatttttaaatattattttgatgtaactttaaatgtaaaatgatattttatctcaaaattgaaaacaatctcctttctttagtacttatgattggtgtgtgtgacttcatcttatgaa

SEQ ID NO: 245 - DNA, 474 bp, Homo sapiens
  misc_feature (0)...(0): n is c, t, a or g
tccagggtctctactgttctcctggccttttctcatgctggctacttcaggatttgagtgtctactacacctgtaggtctcatattttcaacaaagtacaaagaaagatgtagggatgatattacccgtgtctgtccctttttatcaggaaaaccaatgtttctccagaaactcccctatgagaccgggtnccatggccatccccagcagctgatcataattggcttaaacaaattaggatttattgcttggggttctgttagcaaaagaaagggataattatctgtattaatagacagttaataatgtctnccatagggagtaccaaacaatgacaatgacagaaaccagttttcgagtatatgcactgtatcactccctccccaccactgtccactcactctccactagacctcacatccaggtattagcttctatgcacagagacttacctcttacctattcaactttaat

SEQ ID NO: 246 - DNA, 499 bp, Homo sapiens
  misc_feature (0)...(0): n is c, t, a or g
gggacagacacttgtcattgccaagtaagtcacatttaaattccctcaagccttgagaaataatgtgagggaaagtgcaaaaatagcacagtcattcctttggactaagtcaactcctaggcctcctgagagcactgtagctgtgtgttcatctntatgcaaagagaaataaaaagaatcaactatatttgtcacagggtactttcctatataccagcgtacacctctatcaatacattttatgcntgagactttcggtaaggaaagactgaccnatacacactgcctcatgcacagatatagacacatattgaagatactttctttcccctgcaatgcagaaaattgcatgagcacacacaaccacactaaaccaaccagaatgaaactagaggcagctgtatctgattgaaactggtgagaattgagattgacagagttacagggctaggaggttaatgagtccatactcctgcctccagtcagaactgtcctaagc

SEQ ID NO: 247 - DNA, 509 bp, Homo sapiens
  misc_feature (0)...(0): n is c, t, a or g
gccctgaaagctttatagtcctggacatcaaaaattttatttgagatgatgaatgttttgttttcatcttttcttatattaccacaattgagatattttagtaattgaaggaacatacacagatatttggcagaagtcgagtaaggaggggaaaaaaagagtccgtgagtttcagtcattttcactgctcttttcaaaaagattgtgttgagctngtagaagactaaagatgtcactgaagacatcacagatactatatttatcttttggctttgtgtacattagagaatgttgattatttttatacaaaaatacagcgggtaatttttttaatctttanangcctcttgtttgaatgtatgcttngtggaattctttgtgtagtaatgttttaaaaaaagatgtttactgatagttacatgtaggattagaatatgtaatataatataaggctcatgttccagacctacgatagcttgtagtctatgttacgtatttctttatatcac

SEQ ID NO: 248 - DNA, 444 bp, Homo sapiens
  misc_feature (0)...(0): n is c, t, a or g
tgatctccaaacccttattttttctttgaactgtnaaatttccactcatggacgatgcaaccaacagatgcaatctctgagaagatgaaaattgggacctcttattataaaattgacctagctggactcaggaaaccagggaagaagtcaatgcaggcatttaaaatgtaaagttttttctggttaaatctatttatttttcttgtaggttgagtatttcttcccagtttttctgctctggtgtataacaaacaggtcaaaatttcccatctttcctcctgatagtagttgaatcctaccttgcatacttaatgcatagtgaaatggcatctagcagaaatacacacccccaaaacacaccaccatttcattaggtgcccaaaaaattctgtatttagcttatttatttattgttatttttgctttttcttaacccactatata

SEQ ID NO: 249 - DNA, 412 bp, Homo sapiens
  misc_feature (0)...(0): n is c, t, a or g
taaagttgggcagtaatcttaattatgatggaattatcattatgctaagtaattaactttacctagtttgttttacaactagaacctgccctaaatgttgaatatcttcctagcaagaaacagtctgtcattttacttacacgatgtctaaccaaaccataactttacataaactagtcgtttcggtcaaatagaaaaatgtgtgaatgccataaaaacaaaaattctcagttaaatgatactgggaaatagggaagacagcaaagtgagacttgggctcanggatgngttcaggaanaaaaaaaaagaaagacccctgagtaccattaatattcctcagaaattattatttcaaaaggaaatatttctgtattataaatttttcatgagcagccattatgaaatctcacaa

SEQ ID NO: 250 - DNA, 416 bp, Homo sapiens
  misc_feature (0)...(0): n is c, t, a or g
gtgctggctgggaccggaagaactcctgcttggtggangcagagcccatgcagcttgtctgcctcatgcccacgatccacttccggcctgcagagagccgcaagaagagcgccaagggcatgtactcctgcccctgctattactatcccaaccgggcaggcagctcagaccgagcctcctttgtcatcggcattnanctgcggtctggggccatgacacctgatcattggatcaagaggggcactgctctactcatgagcctggacagctgagacctcctcctnttctccgcttgagagagagggtcagggactccaggagctaagacagatgttgcacctaggactgaggccggacctcactcagactttgaccttggccgaatttgtgtgatgtggccctggagatacctagtt

SEQ ID NO: 251 - DNA, 531 bp, Homo sapiens
  misc_feature (0)...(0): n is c, t, a or g
agagtcactacccgagttattcgccggcgtttgattataaaggtatcctgtagctggatcattatgtggcattgctctactattagaaactccttccttgtggttgtagaaactccttccttgtggttgtgaaatttcagcatgcttgataatgaaatggctttgtgtaatttttttgcacccttgaaagcttgtaaaaacaacaaccaaaaagaaaagaagccatgttgcatggtattctgtataggcctatttgatatgtggcggttgtagttttatttganaattcttggcatttgtatcctgctttccttgaagaagtgttatgtgaatgagcaaagattctgtcttggtgacacagtagttcatatcaaatgaaatgtttaattgaaaccttagaaactgtaacaaggtatgaggcacgataaagaagaaagagaatgaaagaattaaaaggcttccttctcagtctcaaattcctactgccttaagaatttttaaattaaaaccagttcttcataagcaatcagt

SEQ ID NO: 252 - DNA, 404 bp, Homo sapiens
  misc_feature (0)...(0): n is c, t, a or g
aataactgctaaggtcctattttgaatttgaagactaagagggagggatgttctttatttcttatagatggaatcaaatttttataaacatgaaaggagtatagcgattgtaacaagacttcttgccatggttatttggagctattaagattaactgccttttaaagagtgggtatttttctgattttcaatattagtttgtggctacattcctttttctactgcaagaatgtttgctctcctttatgaaaagttcaagttggtggagaaactaaatgttntgtacataagtatataactttcttcattcaggaagtagttactgagcgcctactgttttggcttttgtaccaggagtctataaattaatcgttttccacctggcaagtagtctcattggcaaa

SEQ ID NO: 253 - DNA, 348 bp, Homo sapiens
cttgcgatgcatcttactctgtttaatgaatagtagatgcatgtctgttttttgacggcatctaaaatatcataattattatcttgccatttgtgcattttacacaaatatttaataaaactgttattagccaggaagggcaattcccttttctgatattgctagctgtgtttcttgggttgccactattgccactgaatgaaaaaaaccttttcttcacctaaccaggtaatctgcagttctcataatcgctttgtgctattgatgagcagtcatatgtttttcaatgctatttataaagtacggtaaaatcgatgaggaatatgatgctttcgattgttatactaa

SEQ ID NO: 254 - DNA, 319 bp, Homo sapiens
  misc_feature (0)...(0): n is c, t, a or g
attctgaagccagaccgtctttcctcacagcnnnnnngnnncnnnnccgngggcacgcaagcttcccctggttacctgagctgctcctgccgtctcccgcntgggnttcgcngtggtgcacccgatcccggnatcgtgcgtntgcgccctgcgaaagaaggncctgctggcggantccggncggggtctcctgnctcgcagctgggcgaggggacttggaggacagggtgaagctgcagaagacctggggtgggatggntagagaggacgccaaggactggggaaggggaagttaggaataccttacatccaatgccca

SEQ ID NO: 255 - DNA, 447 bp, Homo sapiens
  misc_feature (0)...(0): n is c, t, a or g
ctgcaaagcagtattcctcagcctttggttgggtctttgatatgtggtgatatcctgggtttcaactcttctacaaggttttcttatatataatgtaggatagatacagttgttctgtgatttgggatggttataaaattaaataaccaaatggaaaggcagaaagtgagaaatgttaagtgacattgtagtaccatataatattttagatcttgacttaggcatatacaaagagtatcttacttattttatacaaagtctacaatgttatgatgctacaaagaatgagttaagaatgagtaaacgctaggttttatggagactcataagaaaatataaagattttcgtcttactattcaagtntgaaatgcataaatgaagctttataattggtgtgcaaaaccagacatagaacctgcccttctggactctctggtcaagtgaag

SEQ ID NO: 256 - DNA, 372 bp, Homo sapiens
  misc_feature (0)...(0): n is c, t, a or g
ggatattgtaaacacacctcagggagataacatggggtggaggcagacaaacaggccaatccgggggaggaatggagttaaggaaagctctacaatgaggcagattttttaatacccactccttccaagtccttcagctcaagctgcagccaaatatttgcataaagagctggtaaaggattccagcttcctggttcatgacattacagcatggatcgttttcaaaattaatactgcctcctgtttcagcagtggctgcctgcacagctctccctgtggctcagagtatgggagtgagtatgccctgtaacccaaaagaggtgtggtgagctcngcttcccagcacagaatcacagagcaatacgggtacct

SEQ ID NO: 257 - DNA, 356 bp, Homo sapiens
caagactacactttcttgccttctttctatttattctttttgtgcgtataaatggtatgttgtgatatattctcagtgcttgtgcccaccttggaactctgttcttgctcttcattccgcatgtgatactctggtccaagatcttggccaggtgccttctgctcaaatatcgtctcagaggtgcttcccttgaaaactcggtgctgtttccatagttactctatttgatcactctaagtttggttgtcttcatagcacttgtcaccctctggaactattctattcatttatttacttgtttaatgcttggctcttttcccctcctaacgtaaactccatgattgccaacacctgtt

SEQ ID NO: 258 - DNA, 362 bp, Homo sapiens
  misc_feature (0)...(0): n is c, t, a or g
gcagttccagtctcacagaagtctgctggagaatttcctctggcttggagaaggtggtcttttcattctactcaggtcttctattgattggataangtgncacatacatcatggagggcaatcttctttactcagaggacatcagtgtcaatgttattcccatccagaaacaccttccaagttgacacataaaattaacaatacacttttcctcatctcacccaaatttaggttaagagttctggatacctgaattaatattgccattggaatgccacttttacttttggagaaaaattagaaataacattttataaaattaaaaaactgtaggctnggcacactggtttacacctataatc

SEQ ID NO: 259 - DNA, 536 bp, Homo sapiens
  misc_feature (0)...(0): n is c, t, a or g
gaaatacacccactctcttggaataatgacgtaccactcagttggaccctcaagagtcactgctttgtctgtgctggtagtttgtgagaagtgacccgcacgcttccatttgatgcatttgatgtgagtgaatccatacatttgaatgtcattgtccttgagaccctacatgtgcagtttggctcatctcattaaagatgcttgatgtaataattggttagtttccttttattttcctgcaggcttttccatgagtattatttttttcaaagaacaaatctgtatggcttttccccatctccatattttgttttgctatgaattgctttgctttggtgaacttgtcctagtatgcttgcctcacaaacgttttagccattgtgaattttcttcatctctgtaaatagttcatctgtgcttctccctgatgacgttttattttttttcccctgtaagcaaccgaggtagaaaaataaattgtttaccatggananannnnntgctgccgtctcttagcctgacagtgtcctgttctc

SEQ ID NO: 260 - DNA, 277 bp, Homo sapiens
tcatataatatgttgctgcttttgggggggtgttggggagtaccagagaggtctgcatgcatctgcagtgtacactggcaaacaaaaggtttgtcattcccgttgtcctgttgtgcttcctttccacctctccctggctgttcccccacccccttgttccttttgtaaaggatgcaggtgtagtcttgtgccagtctgtgacataacacctgaacaatttctatggtatcctacccatttgctcagattcaaaccaggccttaatcgataacaagca

SEQ ID NO: 261 - DNA, 421 bp, Homo sapiens; identical to SEQ ID NO: 18
  misc_feature (0)...(0): n is c, t, a or g

SEQ ID NO: 262 - DNA, 384 bp, Homo sapiens
tatcatcatatatttgtcctctagcatgtataacaccaagaggggactctaatgtaaaccatgaactttggatgataatgatgtttcagagtaggttcattgattgtaacaaatgtaccattggatggtaatttggaaagcaaataatcctcagtacagccaagctgaggctttacagaaacagaagtcaatggaggtacagagatagtagcattttgactatttgggactgctgctttaaaatctctttccacagaaaagttgtgtttttctgtttcaccatagaaacatcctccacagcaactctttataaattctgttgccattacattcaatttccaatatccagcaaaagacacaaacttccaatcttaatattaatct

SEQ ID NO: 263 - DNA, 468 bp, Homo sapiens
atgccagaattaccaaaagtcacgaaacacaaacagcaaataaagtgtaatgttacagctataacaactcacataaagtatgcagaaacaactaggaaacactgagaattttaaatctgattaaggagctagtagagattacccagcattcagctcaccatttgaaaccagccaaatgaatatgtgacaagtctcttttaaaaatcttgcactttgaaaaggaaatgtgttataagtgttactcaatctggaagttgcaatgagcttgacaatgtcaaaacatggatttagagattctcaatgaacctctaatgttttaccttcaataaaatctcttttcataaaaggaaaaaaaagattacccaaattctaccatcattttgccactgggattattttcctttcaaacaatttggatgaccattattattcctggacttgaatgtacacgattctcataaacccaat

SEQ ID NO: 264 - DNA, 304 bp, Homo sapiens
  misc_feature (0)...(0): n is c, t, a or g
tgcccccctaggtgctaataaaaggatatttacttcaaagtttctggtttnagaannccncaatncaaagaaaaaaaatacacttttgttggaaattttgtancncaaancatgttgtgaaagagtgtagtgatcttgtgcaaaaaaaatgaacatttgtgagcttcttgctgttttatagattttcttgtaaattattcttgtaacncttctggttttgttgttcttgttgcgaaggtttcaaatatttgtgactgaatgtacggtgaaactgtcataatgttacctagctgagttttgttat

SEQ ID NO: 265 - DNA, 259 bp, Homo sapiens
  misc_feature (0)...(0): n is c, t, a or g
cccagccgctataacttttaacaattcccatatgtcctttattccactaagatgagtgcagtatatatttccatctgtccaaggcttcctaaatgtagccaangccaagccaacaccagtcacatgatcnaaatcaaagggcatttggggaatccaggctgtgattcagggaagttccaagtgtctgatgaagtgtttgttttacatctttgtgtcccttgcaggtctagcactgtgctatgtaggtaacatgtgctcc

SEQ ID NO: 266 - DNA, 433 bp, Homo sapiens
  misc_feature (0)...(0): n is c, t, a or g
gaggagcctgctttgcccagcctggagggcgtcagtgaaaagcagtacaccatctacatcgcacctggaggcggggcgttcacgacnnnnnnnnnnnnnnnnnnnnnnnnnnnnnnnnnnnnnnnattctggaaggtgtcccggccactggagctgtgctatgctcccaccaaggatccaaagtgaccccaccaggggacagccagaggaaggggaccatggggtatccctgtgtcctggtctatcaccccagcttctttgtcccccagtacccccagcccagccagccaataagaggacacaaatgaggacacgtggcttttatacaaagtatctatatgagattcttctatattgtacagagtggggcaaaacacgcccccatctgctgccttttntattgccctgcaacgtcccatctatacgaggtgtt

SEQ ID NO: 267 - DNA, 431 bp, Homo sapiens
  misc_feature (0)...(0): n is c, t, a or g
ggccacaaatggagggattgtcctttcaagcaccacagcttcagataaaattagtactttcaaatattgtccactttaacttaaaaaattctagagggattatattggagactcaactgcccttnggttttagtttataaaatggcctagtactgtggaattttaattttagaaagtcttagcatcagatcataaacattcattaaaagaactcacatcccatctgaaacttcccaggggagttgggattcttagtagattggtagaaaggggctcattttctactgcatttcccatttttggtatcttgttcagcatgttttatttttatttcttgtctgcagaacatcctatatttatgagaacattctttaagaagaccaccacatagaataccccttcctatcagctcgctctgatttagccttaat

SEQ ID NO: 268 - DNA, 463 bp, Homo sapiens
  misc_feature (0)...(0): n is c, t, a or g
aagatgccagccacggactcgtgccagcccagcacccaaggccagtacatggtggtcaccactgagcccctcacccaggccgtggtagacaaaactctccttctggtggtgctgttactcggggtgacccttttcatcacagtcttggttttgtttgccctgcaggcctatgagagctacaagaagaaggactacacccaggtggactacttaatcaacgggatgtatgcggactcagaaatgtgaggggggcgggggnctggcgggaggcctggccccttcctcgtcctttccttttgcctttgagaccaaaccaagtgcttccaaattcttttggtgcaattgaggagatatgccagatgcttaaacacatttaattgctgtcagattaattccatgatcactaaagagttgctgcttttttcatannnannnntgtaaatgattctgtgcccaggagcag

SEQ ID NO: 269 - DNA, 354 bp, Homo sapiens
  misc_feature (0)...(0): n is c, t, a or g
ccattctgagtacttctccgcaaaccctttgtttcattaaggactgttttacatgaagggtgcaaaagtaggataaaaatgagaaccctagggtgaaacacgtgacagaagaataaagactattgaatagtcctcttctctacccatggacnttggnatttttatattngattttaaggaaatataacttagtagtaaagagatgagcattcaagtcaggcagacctgaatttgggtcaaggctgcgccactcaaaagctatatgacctctatatgagcagcttattcaacctcttttaacctccattttgtcatctgtagaatgatgataaatgcctagctcagaaggattcc

SEQ ID NO: 270 - DNA, 524 bp, Homo sapiens
aaactccagggctcattagtccttttataaacgccggtgtgaaatgatgggtatccgtgtgcctggtccaagtttcctggtggttgacttgggcgaataaaaataagacatgttctgcagagttctccttttaaattcttgtgtaatattccgtttgttttgctcctttgcaattaactacaaacttctaagtcctagaaaagatttcaagtatttatagagtgagcaacgatcattttcctagtcaaatagtatggcaaaaatcactgttttaaaaagttgtggcattaaactataaatcctccctcccctcgcttcccacccccaattatgaaagaaaagcatatgacaatgcctactgggctcagcttttgggctaattgagtctgactgagccttcttagcaggttcctgtcttttgaaacctcaaatcccaaaaagctgtctaataattttacttttttagggactaagaccaggtattttcagcagaggttcttacttttctgtaattgaggcgcaac

SEQ ID NO: 271 - DNA, 75 bp, Homo sapiens
aaatgcagataaaggctacctctgaattctcaatagattcatcatgtttgctcttaagtgtagctgtccacactg

SEQ ID NO: 272 - DNA, 418 bp, Homo sapiens; identical to SEQ ID NO: 2

SEQ ID NO: 273 - DNA, 462 bp, Homo sapiens
gggcaggacatgctgtaccaatccctgaagctcactaatggcatttggattttggccgaactacgtatccagccaggaaaccccaattacacgctgtcactgaagtgtagagctcctgaagtctctcaatacatctatcaggtctacgacagcattttgaaaaactaacaagactggtccagtacccttcaaccatgctgtgatcggtgcaagtcaagaactcttaactggaagaaattgtattgctgcgtagaatctgaacacactgaggccacctagcaaggtagtaactagtctaacctgtgctaacattagggcacaacctgttggatagttttagcttcctgtgaacatttgtaaccactgcttcagtcacctcccacctcttgccacctgctgctgctatctgtccttacttgtgggcttctccatgctgtgccaatggctggctttttctacacc

SEQ ID NO: 274 - DNA, 544 bp, Homo sapiens
  misc_feature (0)...(0): n is c, t, a or g
tgtgccttcattcatgggttaatggattaatgggttatcacaggaatgggactggtggctttataagaagaggaaaagagaactgagctagcatgcccagcccacagagagcctccactagagtgatgctaagtggaaatgtgaggtgcagctgccacagagggcccccaccangggaaatgtctagtgtctagtggatccaggccacaggagagagtgccttgtggagcgctgggagcaggacctgaccaccaccaggaccccagaactgtggagtcagtggcagcatgcagcgcccccttgggaaagctttaggcaccagcctgcaacccattcgagcagccacgtaggctgcacccagcaaagccacaggcacggggctacctgangccttgggggcccaatccctgctccagtgtgtccgtgaggcagcacacgaagtcaaaagagattattctcttcccacagataccttttctctcccatgaccctttaacagcatctgcttcattcccctcaccttcccaggctgatctgaggtaaa

SEQ ID NO: 275 - DNA, 550 bp, Homo sapiens
aaagcctgagacagctgccttgtgtgcgactgagatgcacagctgccttgtgtgcgactgagatgcaggatttcctcacgcctcccctatgtgtcttaggggactctggcttctctttttgcaagggcctctgaatctgtctgtgtccctgttagcacaatgtgaggaggtagagaaacagtccacctctgtgtctaccatgacccccttcctcacactgacctgtgttccttccctgttctcttttctattaaaaataagaacctgggcagagtgcggcagctcatgcctgtaatcccagcacttagggaggccgaggagggcagatcacgaggtcaggagatcgaaaccatcctggctaacacggtgaaaccccgtctctactaaaaaatacaaaaaattagctgggcgcagaggcacgggcctgtagtcccagctactcaggaggcggaggcatggagaatggcgtcaacccgggaggcggaggttgcagtgagccaggattgtgcgactgcactccagcctgggtgacagggtgaaacgccatctc

SEQ ID NO: 276 - DNA, 388 bp, Homo sapiens
atactgaggtggatccctgcatcctcaacaacaatgtgcagtgagcatgtggaagaaaagaagcagctttacctacttgtttctttttgtctctcttcctggacactcactttttcagagactcaacagtctctgcaatggagtgtgggtccaccttagcctctgacttcctaatgtaggaggtggtcagcaggcaatctcctgggccttaaaggatgcggactcatcctcagccagcgcccatgttgtgatacaggggtgtttgttggatgggtttaaaaataactagaaaaactcaggcccatccattttctcagatctccttgaaaattgaggccttttcgatagtttcgggtcaggtaaaaatggcctcctggcgtaagctttt

SEQ ID NO: 277 - DNA, 543 bp, Homo sapiens; identical to SEQ ID NO: 33

SEQ ID NO: 278 - DNA, 518 bp, Homo sapiens
gtattcttactatggttgcctttccctatttgttcaatagactgataatactggtatttatagagtttgagccattacaacttttgtgaggatgtgtttcaaacatttctggacaaatcttattttgtatttctggaagaatgtagtaatcttctagaccgcttaaaaccaatgctcccaagctgaatattcttgagcaaatttgttttttattatgccatttgacatttcaaatcagtgctcatatacagtaaacttgtgatagaaattgtattttattgctttttggattataattcatataaatataattacttgaatattgtttgagatcattaacatgccagggcagttcccactgatttagatggtccaagataatctcattcaggaggcttgaaacattaatggtttagtcttgtgaattttaacagttctctgtcatcgtttaacaaaaccaacaactgacacaactccttaagctgtggtttcagtctctgctagttcatattgcatgt

SEQ ID NO: 279 - DNA, 278 bp, Homo sapiens
gatctggtgcggaacctgcaaagtgaggtggagggagttaagaatattatgacccagaatgtggagcggatcctggcccggggggaaaacttggaacatctccgcaacaagacagaggatctggaagccacatctgagcacttcaagacgacatcgcagaaggtggctcgaaaattctggtggaagaacgtgaagatgattgtccttatctgcgtgattgtttttatcatcatcctcttcattgtgctctttgccactggtgccttctcttaaagtaa

SEQ ID NO: 280 - DNA, 492 bp, Homo sapiens
gggggccacagggtgggctgtggagctctcaggaagggccctgaggaaggcacacttgctcctgttggtccctgtccttgctgcccaggcagcgtggaggggaagggtagggcagccagagaaaggagcagagaaggcacacaaacgaggaatgaggggcttcacgagaggccacagggcctggctggccacgctgtcccggcctgctcaccatctcagtgaggggcaggagctggggctcgcttaggctgggtccacgcttccctggtgccagcacccctcaagcctgtctcaccagtggcctgccctctcgctcccccacccagcccacccattgaagtctccttgggccaccaaaggtggtggccatggtaccggggacttgggagagtgagacccagtggagggagcaagaggagagggatgtcgggggggtggggcacggggtaggggaaatggggtgaacggtgctggcagttcggctagatttct

SEQ ID NO: 281 - DNA, 286 bp, Homo sapiens; identical to SEQ ID NO: 54

SEQ ID NO: 282 - DNA, 411 bp, Homo sapiens
ttctggctggaacggacgatgccccgaattcccaccctgaagaacctagaggatcttgttactgaataccacgggaacttttcggcctggagtggtgtgtctaagggactggctgagagtctgcagccagactacagtgaacgactctgcctcgtcagtgagattcccccaaaaggaggggcccttggggaggggcctggggcctccccatgcaaccagcatagcccctactgggcccccccatgttacaccctaaagcctgaaacctgaaccccaatcctctgacagaagaaccccagggtcctgtagccctaagtggtactaactttccttcattcaacccacctgcgtctcatactcacctcaccccactgtggctgatttggaattttgtgcccccatgtaagcacc

SEQ ID NO: 283 - DNA, 410 bp, Homo sapiens; identical to SEQ ID NO: 55

SEQ ID NO: 284 - DNA, 570 bp, Homo sapiens
tgtagatggcgactgtgttatagacggtgctcactcccaagggacagcaagtgagcagagatgtactgcaaagtcgccagtcactgcgtgcaaggtggcctctgcctggggccgtccagaagctgctcctttaccctcttggtcccatggctgaagcggagcagctggattgctctggagcagccaaggccgccactgtggagacagagctctcccctcctgctgggcgtgtgtgacactgtagagtttcactgtactcgatgtgacttctcccctgcccttcctcctgatggagtgtgcagacagccatgcgtggccacgggggcagtgtgaggacctccctgtctcccgctcccctcccagggagcagctgcttgacctagctctttgggcctctcctgccctctgctctgcctggagtgtcggatcctgtgagtaggctgggcctcccctgggcagggttctccaaggccggtttcccggcccttaccaaacctgatgcccctgacatcatcattcttgtgggagacagcagcctgtatgtggtgtggggcgtggatcgagtgtagc

SEQ ID NO: 285 - DNA, 478 bp, Homo sapiens; identical to SEQ ID NO: 57

SEQ ID NO: 286 - DNA, 503 bp, Homo sapiens
cagatcctccaaaggcacacgttgcccaccaccccatctctgaccatgaggccaccctgaggtgctgggccctgggcttctaccctgcggagatcacgctgacctggcagcgggatggggaggaacagacccaggacacagagcttgtggagaccaggcctgcaggggatggaaccttccagaagtgggccgctgtggtggtgccttctggagaggaacagagatacacatgccatgtgcagcacgaggggctgccccagcccctcatcctgagatgggagcagtctccccagcccaccatccccatcgtgggcatcgttgctggccttgttgtccttggagctgtggtcactggagctgtggtcgctgctgtgatgtggaggaagaagagctcagatagaaacagagggagctactctcaggctgcagtcactgacagtgcccagggctctggggtgtctctcacagctaataaagtgtgagacagcttccttgtgtgggac

SEQ ID NO: 287 - DNA, 339 bp, Homo sapiens; identical to SEQ ID NO: 61

SEQ ID NO: 288 - DNA, 543 bp, Homo sapiens; identical to SEQ ID NO: 66

SEQ ID NO: 289 - DNA, 383 bp, Homo sapiens; identical to SEQ ID NO: 68

SEQ ID NO: 290 - DNA, 550 bp, Homo sapiens
ggctgtcgactgggctaagtctggaaaattcacacagcaagacatcgacgaagccaaactttctgtcttctcaaccgtagatgctcctgtcgctccttcagacaaaggaatggaccacttcttgtacggcctctcggatgagatgaagcaggcccacagagagcagctctttgctgtcagccacgacaagctcctggccgtgagcgatagatacctcggcactgggaagagcacacacggcctggccatcctcggacccgagaacccgaaaattgccaaggacccatcctggatcatccgatgagcagccgtggcgctcgactgcacaggagcccgagacaatacacctccgagctgaatatgaaaagtcagaaatgctactgctttttccaagaatattatgtcattgagtgtcgccaaagcccttgactggcgagtcaaaaactcagatctatcttaagagtgaccaggaagaggttcattgaaataatcatgcatgaagcgccaaagatgcaccatgtagaattttcactttgtactggcaggctcg

SEQ ID NO: 291 - DNA, 520 bp, Homo sapiens; identical to SEQ ID NO: 69

SEQ ID NO: 292 - DNA, 449 bp, Homo sapiens
ttcctgttctcttgtatagctgaaattccagtttaggagctcagttgagaaacagttccattcaactggaacatttttttttttccttttaagaaagcttcttgtgatccttcggggcttctgtgaaaaacctgatgcagtgctccatccaaactcagaaggctttgggatatgctgtattttaaagggacagtttgtaacttgggctgtaaagcaaactggggctgtgttttcgatgatgatgatcatcatgatcatgatgattttaacagttttacttctggcctttcctagctagagaaggagttaatatttctaaggtaactcccatatctcctttaatgacattgatttctaatgatataaatttcagcctacattgatgccaagcttttttgccacaaagaagattcttaccaagagtgggctttgtggaaacagctggtact

SEQ ID NO: 293 - DNA, 508 bp, Homo sapiens
gatcttaaagccacggagaagcctctcatcttatggcattgacaaagagaagaccatccaccttaccctgaaagtggtgaagcccagtgatgaggagctgcccttgtttcttgtggagtcaggtgatgaggcaaagaggcacctcctccaggtgcgaaggtccagctcagtggcacaagtgaaagcaatgatcgagactaagacgggtataatccctgagacccagattgtgacttgcaatggaaagagactggaagatgggaagatgatggcagattacggcatcagaaagggcaacttactcttcctggcatcttattgtattggagggtgaccaccctggggatggggtgttggcaggggtcaaaaagcttatttcttttaatctcttactcaacgaacacatcttctgatgatttcccaaaattaatgagaatgagatgagtagagtaagatttgggtgggatgggtaggatgaagtatattgcccaactctatgtttctttga

SEQ ID NO: 294 - DNA, 386 bp, Homo sapiens
aatggattgattcctgcctttattcttgtaataatagcttcttttacttcttttttcttcacacatcgaatacccaaattttggaaaaacaaaggtctgcgttcttgtccaaattctgcttcatagtagccgtctctgcagtcttttccaactaaatcatgaggatgaggtttatatgggtcattctttgttactaatgtaattctcacttttccttttccataatagttcataatctggatagaagggtatgttcggttgttgtctgtgctgtgctcccctggaatgctgcctgctgatcgcccttcacatttgtatctaaaacgcattcccctctgcctgggttgttcaattatctctatatacgggttatacgcaccggaggc

SEQ ID NO: 295 - DNA, 244 bp, Homo sapiens
gatgtggctctaaatcagccggacatgtgcgtctaccgaagagggaggaagaagagagtgccttacaccaaactgcagcttaaagaactggagaacgagtatgccattaacaaattcattaacaaggacaagcggcggcgtatctcggctgctacgaacctatctgagagacaagtgaccatttggtttcagaaccgaagagtgaaggacaagaaaattgtctccaagctcaaagatactgtct

SEQ ID NO: 296 - DNA, 405 bp, Homo sapiens; identical to SEQ ID NO: 83

SEQ ID NO: 297 - DNA, 561 bp, Homo sapiens; identical to SEQ ID NO: 85

SEQ ID NO: 298 - DNA, 155 bp, Homo sapiens
agggtttcatccaggatcgagcagggcgaatggggggggaggcacccgagctggccctggacccggtgcctcaggatgcgtccaccaagaagctgagcgagtgtctcaagcgcatcggggacgaactggacagtaacatggagctgcagaggatg

SEQ ID NO: 299 - DNA, 437 bp, Homo sapiens; identical to SEQ ID NO: 88

SEQ ID NO: 300 - DNA, 514 bp, Homo sapiens
gaagtaagcctcatcatcagagcctttcctcaaaactggagtcccaaatgtcatcaggttttgttttttttcagccactaagaacccctctgcttttaactctagaatttgggcttggaccagatctaacatcttgaatactctgccctctagagccttcagccttaatggaaggttggatccaaggaggtgtaatggaatcggaatcaagccactcggcaggcatggagctataactaagcatccttagggttctgcctctccaggcattagccctcacattagatctagttactgtggtatggctaatacctgtcaacatttggaggcaatcctaccttgcttttgcttctagagcttagcatatctgattgttgtcaggccatattatcaatgtttacttttttggtactataaaagctttctgccacccctaaactccaggggggacaatatgtgccaatcaatagcacccctactcacatacacacacacctagccagctgtcaagggc

SEQ ID NO: 301 - DNA, 509 bp, Homo sapiens
gacctggcagcgggatggcgaggaccaaactcaggacaccgagcttgtggagaccagaccagcaggagacagaaccttccagaagtgggcagctgtggtggtgccttctggagaagagcagagatacacatgccatgtacagcatgaggggctgccgaagcccctcaccctgagatgggagccatcttcccagtccaccgtccccatcgtgggcattgttgctggcctggctgtcctagcagttgtggtcatcggagctgtggtcgctgctgtgatgtgtaggaggaagagttcaggtggaaaaggagggagctactctcaggctgcgtccagcgacagtgcccagggctctgatgtgtctctcacagcttgaaaagcctgagacagctgtcttgtgagggactgagatgcaggatttcttcacgcctcccctttgtgacttcaagagcctctggcatctctttctgcaaaggcacctgaatgtgtctgcgtccctgttagcataatgt

SEQ ID NO: 302 - DNA, 476 bp, Homo sapiens
ccgcctggcttgggtggcaagagaaaaggaggacagcgcccaggaggaaagaggaggaagtaatagtttctaactgtcggacccgtctgtaaaccaaggactatgaatactaaatgttaagttctaggcaattatacggggactcagaaggacctggccgctgccttcattgagtttaaagggacaggattgcccttccgtcaagaaagtatgtaagtgttggactgcacaaattaatgtttttcccacaaccgagactttggagattaagaacttatttgaggatttaagaattagggaaataatttggtggaaaccgggaatgagttctattcttaaacagcctttttttttctttttaatgttggatatacggcgaggtagagttggccatatttcagagacttagattgacgtatatgtttctgcattatttttacaacaagtttgtgtatcagagcgggagtgcgggggag

SEQ ID NO: 303 - DNA, 540 bp, Homo sapiens; identical to SEQ ID NO: 96

SEQ ID NO: 304 - DNA, 571 bp, Homo sapiens
agagagacacagctgcagaggccacctggattgcgcctaatgtgtttgagcatcacttaggagaagtcttctatttatttatttatttatttatttatttgtttgttttagaagattctatgttaatattttatgtgtaaaataaggttatgattgaatctacttgcacactctcccattatatttattgtttattttaggtcaaacccaagttagttcaatcctgattcatatttaatttgaagatagaaggtttgcagatattctctagtcatttgttaatatttcttcgtgatgacatatcacatgtcagccactgtgatagaggctgaggaatccaagaaaatggccagtaagatcaatgtgacggcagggaaatgtatgtgtgtctattttgtaactgtaaagatgaatgtcagttgttatttattgaaatgatttcacagtgtgtggtcaacatttctcatgttgaagctttaagaactaaaatgttctaaatatcccttggacattttatgtctttcttgtaagatactgccttgtttaatgttaattatgcagtgtttccctc

SEQ ID NO: 305 - DNA, 458 bp, Homo sapiens
tactggcacaagtttatcttcttccagatttcctttcagaacactcaaaggttcgactagtgatagtggatggtattgcttttccatttcgtcatgacctagatgacctgtctcttcgtactcggttattaaatggcctagcccagcaaatgatcagccttgcaaataatcacagattagctgtaattttaaccaatcagatgacaacaaagattgatagaaatcaggccttgcttgttcctgcattaggggaaagttggggacatgctgctacaatacggctaatctttcattgggaccgaaagcaaaggttggcaacattgtacaagtcacccagccagaaggaatgcacagtactgtttcaaatcaaacctcagggatttagagatactgttgttacttctgcatgttcattgcaaacagaaggttccttgagcacccggaaacggtcacgagac

SEQ ID NO: 306 - DNA, 492 bp, Homo sapiens
ggcataggaacagttttctcttcatatattatgattatgaataataggaaagttgtattaattcagtatttgtcattatgcagtattttaatacctacataagtctattccattattatattttgcgcttggcatatttattcctttatgcttttaatcactaacatattttacttaagagtataaaactatgctaaataaattgtattgtatatggaatatgcttgccattatgaagaacagctgggtataccattatttcaagtaataaatctgaattctattagtttaaaaattgtaaaattcaagttaaatgacgtgtatgatatataagctgaacacattttctatagcccttaatttagttgtgttaatttttcaaggtgatgtatcaacagctttttttttttgcatttgttttttcaatgtgtttacattgtatgaattgagctttttgcccacagattcttgatttgtagttgtttggcagga

SEQ ID NO: 307 - DNA, 482 bp, Homo sapiens; identical to SEQ ID NO: 102

SEQ ID NO: 308 - DNA, 550 bp, Homo sapiens
gaaagtgtcctatttgtaggagtacaatcaagggtacagttcgtacatttctttcatgaagaagaaccaaaacatcatctaaactttagaattaatttattaaatgtattataactttaacttttatcctaatttggtttccttaaaatttttatttatttacaactcaaaaaacattgttttgtgtaacatatttatatatgtatctaaaccatatgaacatatattttttagaaactaagagaatgataggcttttgttcttatgaacgaaaaagaggtagcactacaaacacaatattcaatcaaaatttcagcattattgaaattgtaagtgaagtaaaacttaagatatttgagttaacctttaagaattttaaatattttggcattgtactaatacctggttttttttttgttttgtttttttgtacagacagggcagcatactgagaccctgcctttaaaaacaaacagaacaaaaacaaaacaccagggacacatttctctgtcttttttgatcagtgtcctatacatcgaaggtgtgcata

SEQ ID NO: 309 - DNA, 482 bp, Homo sapiens
caccaccctgtctttgactatgaggccaccctgaggtgctgggccctgggcttctaccctgcggagatcatactgacctggcagcgggatggggaggaccagacccaggacgtggagctcgtggagaccaggcctgcaggggatggaaccttccagaagtgggcagctgtggtggtgccttctggagaggagcagagatacacgtgccatgtgcagcatgaggggctgccggagcccctcatgctgagatggaagcagtcttccctgcccaccatccccatcatgggtatcgttgctggcctggttgtccttgcagctgtagtcactggagctgcggtcgctgctgtgctgtggagaaagaagagctcagattgaaaaggagggagctactctcaggctgcaagcagtgacagtgcccagggctctaatgtgtctctcacggcttgtaaattgtgaaacagctgccctgtgtgggactgagt

SEQ ID NO: 310 - DNA, 501 bp, Homo sapiens
acacagatccaggtagtctctgctagtaatgagccccttgcctttgcttcctgtggcacagagggatttcggaatgccaagaagggcacaggcatcgcagcacagacagcaggcatagccgcagcggcgagagctaaacaaaagggcgtgatccacatccgagttgtggtgaaaggcctggggccaggacgcttgtctgccatgcacggactgatcatgggcggcctggaagtgatctcaatcacagacaacaccccaatcccacacaacggctgccgccccaggaaggctcggaagctgtgatgggaaggaggcctgcacttggacctgacctcaagcctcagctccagtgggaccttgtaaaatgctccctgtcagagctctccagaatatgcttgttggagatccttcaggcagtaagggagagttttgcctccttacacagtggcctttgcttgcacctccagctggagatgggtgtgccccagaagtaagctttgc

SEQ ID NO: 311 - DNA, 391 bp, Homo sapiens; identical to SEQ ID NO: 107

SEQ ID NO: 312 - DNA, 244 bp, Homo sapiens
ccagcacgggcttcagtagtggacccagttctattgttggcttcagcggtggaccaagcactggtgttggcttctgcagtggaccaagcaccagtggcttcagcggtggaccgagcacaggagctggcttcggcggtggaccaaacactggtgctggctttggtggtggaccgagcaccagtgctggctttggcagtggagccgccagtcttggtgcctgtggcttctcgtatggctagtgagg

SEQ ID NO: 313 - DNA, 370 bp, Homo sapiens; identical to SEQ ID NO: 110

SEQ ID NO: 314 - DNA, 441 bp, Homo sapiens; identical to SEQ ID NO: 112

SEQ ID NO: 315 - DNA, 295 bp, Homo sapiens; identical to SEQ ID NO: 113
  misc_feature (0)...(0): n is c, t, a or g

SEQ ID NO: 316 - DNA, 306 bp, Homo sapiens; identical to SEQ ID NO: 118

SEQ ID NO: 317 - DNA, 521 bp, Homo sapiens
  misc_feature (0)...(0): n is c, t, a or g
tacatttttccacgagctggtgcagacagctctgccatcaggcagctgtgtggacaccttgttaaaggacttgtgcaaaatgtacaccacacttacagcccttgtcagatattatctccaggtgtgtcagagctccggaggaattccaaaaaatatggaaaagctggtgaagctgtctggttctcatctgacccccctgtgttattctttcatttcttacgtacagaataagagtaagagcctgaactatacgggagagaaaaaggagaaacctgctgccgttgccacagccatggccagagttcttcgggaaaccaagccaatccctaacctcatctttgccatagaacagtatgaaaaatttctcatccacctttctaagaagtccaaggtgaacctgatgcagcacatgaagctcagcacctcacgagacttcaagatcaaaggaaacatcctagacatggttcttcgagaggatggngaagatgaaaatgaagagggcactgcatcagagcatgggg

SEQ ID NO: 318 - DNA, 419 bp, Homo sapiens
gggaacactgctctcagacattacaagactggacctgggaaaacgcatcctggacccacgaggaatatataggtgtaatgggacagatatatacaaggacaaagaatctaccgtgcaagttcattatcgaatgtgccagagctgtgtggagctggatccagccaccgtggctggcatcattgtcactgatgtcattgccactctgctccttgctttgggagtcttctgctttgctggacatgagactggaaggctgtctggggctgccgacacacaagctctgttgaggaatgaccaggtctatcagcccctccgagatcgagatgatgctcagtacagccaccttggaggaaactgggctcggaacaagtgaacctgagactggtggcttctagaagcagccattaccaactgtacct

SEQ ID NO: 319 - DNA, 534 bp, Homo sapiens; identical to SEQ ID NO: 129

SEQ ID NO: 320 - DNA, 391 bp, Homo sapiens; identical to SEQ ID NO: 134

SEQ ID NO: 321 - DNA, 553 bp, Homo sapiens
  misc_feature (0)...(0): n is c, t, a or g
cactactgctgcagctcacaaacacctctgcatattacatgtacctcctcctgctcctcaagagtgtggtctattttgccatcatcacctgctgtctgcttngaagaacggctttctgctgcaatggagagaaatcataacagacggtggcacaaggaggccatcttttcctcatcggttattgtccctagaagcgtcnncnnannnnnnnnttgggctttctttctgggtttgggccatttcagttctcatgtgtgtactattctatctattgtataatggttttcaaaccagtgggcacacagagaacctcactctgtaataacaatgaggaatagccatggcgatctccagcaccaatctctccatgttttccacagctcctccagccaacccaaatagcgcctgctatagtgtagacagcctgcggcttctagccttgtccctctcttagtgttctttaatcagataactgcctggaagcctttcattttacacgccctgaagcagtcttctttgctagttgaattatgtggtgtgtttttccgtaata

SEQ ID NO: 322 - DNA, 472 bp, Homo sapiens
cgacagtgcccaggggtctgagtctcacagcttgtaaagcctgagacagctgccttgtgtgcgactgagatgcacagctgccttgtgtgcgactgagatgcaggatttcctcacgcctcccctatgtgtcttaggggactctggcttctctttttgcaagggcctctgaatctgtctgtgtccctgttagcacaatgtgaggaggtcagagaaacagtccacctctgtgtctaccatgacccccttcctcacatgacctgtgttccttccctgttctcttttctattaaaaataagaacctgggcagagtgcggcagtcatgcctgtaatcccagcattagggaggccgaggagggcagatcagaggtcaggagatcgaaaccatcctgctaagaggtgaaccgtctctactaaaaatacaaaaattagctggcgcagaggcaggctgtgatccagctactcaggagcgagc

SEQ ID NO: 323 - DNA, 488 bp, Homo sapiens
gatgacaattcagaccaggctcaccggtgccgtcacttaggaatgctggaacaaaggacatttctcaaagttcccctgaagacatgccatctctagaaccttttttctccccgactctacccccacctctgttcctagagccctctgctggcgagtccagaaacattattgcccagaaggattatgtgtttatggattattttgccccgcctcaggagcgcaggaagtcactaccatttatattctaaaacagaactatctatgttcataggacttctgatgtgttcagataggaatcctcatgagagatcattatgctttgtgccctggaccactgccgctctgggttctcaggaggaacaggcaagggcagcttcattctaagcctttccagtgacctcagccttgcttctcttctacaacactaaggctcctctgtcagaggaggtcgtcttgtttttgcttcattgcatgacataacccttccc

SEQ ID NO: 324 - DNA, 522 bp, Homo sapiens
tacgtcaaagaccgctgctgcagtagctgcccagtcaggaatacttgataggacaatttctgtaattatgaagaatcaaacaccaacaaagaagtatgatggctacacatcatgtccactggtgaccggctacaaccgtgtgattcttgctgagtttgactacaaagcagagccgctagaaaccttcccctttgatcaaagcaaagagcgcctttccatgtatctcatgaaagctgacctgatgcctttcctgtattggaatatgatgctaaggggttactggggaggaccagcgtttctgcgcaagttgtttcatctaggtatgagttaaggatggctcagcacttgctcatcttggatggcttctgggccaaaactgcagtcactgaatgaccaagagcagcacgaaggacttggaacctatccttgtaaagagttccttgatgggtaatggtgaccaaatgcctcccttttcagtacctttgaacagcaaccatgtgggctactcatgatgggcttgat

SEQ ID NO: 325 - DNA, 346 bp, Homo sapiens
tctggacatgagcctttgacctgggtggggcagaaagaaccacaaactccatctcccaatagaactttgaaattcactcagcttttcctttcatgctgtttgttgcctgcttgttgcactcctcctgccccagaactgcaagatttttagcttcacccctttctgagagtaatgttatcttttatcagaatcagtatcagttcccctgtattctgtgcttcatcgaatttgcaagactgacctcttttaagcatttaattcactcccagagtcatctggtcaggttgcaatatgaggacttctctgtctcctctgaagcctgggacactgagcttacttaatacat

SEQ ID NO: 326 - DNA, 342 bp, Homo sapiens
  misc_feature (0)...(0): n is c, t, a or g
tgccgtcagccgaactttgttatggagggagcagcctcacacaagcagaaacactcctgtggatggtattgtagcatgtattgtttattttagtcaatagaccctctccttataaatggtgtttagtcttcctgttgcatttcatgggcctgggggtttcctngcagaggatattggagcccctttttgtgacattaccaattacatctttgtccacgtttaatactttgttttggaaaatttaaatgctgcagatttgtgtagagttctaataccaaagacagaagtaaatgttttccatatactttgtcttgcctgtatgcagcccttgtgtaatatggt

SEQ ID NO: 327 - DNA, 413 bp, Homo sapiens
tcacctctagaatagccacccaaagaccttcctgaggctgcctcagaagcaccacttgctgttttgaatgactctactagtatgagaaggatgtgaaggtggttggctggttgggctttaacttcctgggattcataatttttaagcttggaagatagctgctgttcccatgatgggcacatttcctgagaagcttgaatgactgatgagcatagagcacccctgccttcctcaggaaacctgaccggcaggggctctctggcttcctgaaagcttcacctcttccctcgtttatatctcaactgtaagggcattttcaagcttctgttcatggaatgagcaactcagactgtctggagcttgctgagtacaaacacaccaccactaagtttcagaactttccttaggacttg

SEQ ID NO: 328 - DNA, 429 bp, Homo sapiens
  misc_feature (0)...(0): n is c, t, a or g
tctaccctgcggagatcacgctgacctggcagcgggatggggaggaacagacccaggacacagagcttgtggagaccaggcctgcaggggatggaaccttccagaagtgggccgctgtggtggtgcctnctggagaggaacagagatacacatgccatgtgcagcacgaggggctgccccagcccctcatcctgagatgggagcagtctccccagcccaccatccccatcgtgggcatcgttgctggccttgttgtccttggagctgtggtcactggagctgtggtcgctgctgtgatgtggaggaagaagagctcagatagaaacagagggagctactctcaggctgcagtgtgagacagcttccttgtgtgggactgagaagcaagatatcaatgtagcagaattgcacttgtgcctcacgaacata

SEQ ID NO: 329 - DNA, 415 bp, Homo sapiens
atacttgagattttcctccatttttatttcttcgtgaacatagagtttggggccgaaaatgtttttaaagtatgtgtttgagttaaatataaagttggttcacttcaaagctaaaaaattgttaaacttgcagcttggtattgcagagaagattttataagaattttgctttagagaatgccactttggctgaactacaagtgtaggccaccattataatttataaatacagcatacttcaaaactgtttgttatctcttgttaccatgtatgtataaatggaccttttataaccttgttctctgcttgacagactcaagagaaactacccaggtattacacaagccaaaatgggagcaaggccttctctccagactatcgtaacctggtgccttaccaagttgtgcttttctgt

SEQ ID NO: 330 - DNA, 492 bp, Homo sapiens
ggcagctgcagacaagtggttaactggtttggcagaatggcatgttcctgctgctggaatgtttttatggattaaagttaaaggcattaatgatgtaaaagaactgattgaagaaaaggccgttaagatgggggtattaatgctccctggaaatgctttctacgtcgatagctcagctcctagcccttacttgagagcatccttctcttcagcttctccagaacagatggatgtggccttccaggtattagcacaacttataaaagaatctttatgaagaaattaaactaggttgggcatggtgcgtcacacctataatcccagcactttgggaggcagaggagggaggatcacttgaacccaggaattcaggctgcagtaagctacgatcacaccactgcactctggcctgcatgcactctggcctgcatggcagaacaagaccctgtctctaaaaaaagagaaagaaatcaaactaatcatgctgctcat

SEQ ID NO: 331 - DNA, 539 bp, Homo sapiens; identical to SEQ ID NO: 173

SEQ ID NO: 332 - DNA, 464 bp, Homo sapiens
gattcctggtctttttaacacgaagaatatctattgttttctcttttgtaggatctgtatgattttatctacttaacagatagcactaattagattaaaattctataagaaactttttaatttgctgttcataatttctgattggtatgcaataactgtttcaatgaaaatcaatgtaatttagtattttaatatttgcacctttgtgaaatatagtaaataaattaagcactatcaccaccttcacagctacttaggagatccacaatcctgggttgggagccagtggatttcctgaaacacagatttgttaatgcgtttataaaatactgatgaaatgatattagtaatgtgcagtgaccatcattgactttcatgatacaattaagtttacataatttttatacttttatatatcattttaattcaatcctgtgtatttattccttcttctgtaatgacca

SEQ ID NO: 333 - DNA, 534 bp, Homo sapiens
gaccagctccaggagctctgcatcccccaagacctggtcggggacttggccagcgtggtatttgggagccagcggcccctccttgattctgtggcccagcagcagggggcctggctgccgcatgttgctgactttcggtggcgggtggatgtagcaatctccaccagtgccctggctcgctccctgcagccgagcgtcctgatgcagctgaagctttcagatgggtcagcataccgctttgaggtccccacagccaagttccaggagctgcggtacagcgtggccctggtcctaaaggagatggcagatctggagaagaggtgtgagcgcagactgcaggactgacccctcacttgaccagtcccattcagatccggcttggacaggcacctgagatggtgccaaagtgcagctgactcttcccacgacagccctgcccttcccatgaggcaggctcttcagtgagtgtttgaacgtaattatgtagttttctgtttaattgaaaaagagagctatgcctttttttctttttgg

SEQ ID NO: 334 - DNA, 366 bp, Homo sapiens
caacattctcttctcaaacactgaccaaggaacagaggaagatgcagtcagagaaagtagcaggatagagacgccgagagaggagtatatgtgggtcacagcagtgagctcccacccgccttgcagtgaagatgtgaccccaggagagggagtgtctccttccaggtgctagctctggacagcagctgattttaggcaggaaagtttcttcatcgttgtcctccctgctggtcacatgagtttacgattccttagaagtgtctcccacagggtggcaggactgggagaatctctgaggcgtgtcttccaggccctcccacagcttgtgccctccacagtgtaggcttgaacacttggcctcatgcg

SEQ ID NO: 335 - DNA, 423 bp, Homo sapiens
gcagaacatatgtaaccagaaggacaaatccacccttcccttttgtcaagcacatctgtgtgaagagaccaccaacaggctttgtgtgagcaacaaggctgtttattcacttgagtgcaagtgggctgagtctgaaaacagagtcagtgaagggagatggggaaggggttgctttataggagttgggtaggtaatggaaaattacagtaaaaagtggttatctattgttagcagaggagggggtcacaaggtacatggtggggagatgataagacccattgtccagaagaagactgtcacaaggtcgattgatcagttaaggtaggacagggacaggtcacaatggtggaatgttgtaatgttggttaatcagttaaggcaggaactggctgttttacttcttgtgtggtttttcagctgccc

SEQ ID NO: 336 - DNA, 503 bp, Homo sapiens
accaagcctggctttatgtatttatttctgttcatgcggaatgattggttcagaactgttcctttcccttccatgatgtccttgacacagaaggttatgcctggctcccagtcaggcttcatacttttggtccatgtaagtgctacccgttgctgggggaggagtcatggtttatttggaaatgtcagttgcaatcatggttctgtcatttgactgcacagtatcagaggagcctgttaacctctctgtgccttagtttcttagcccatgaaagagatcattgcctgacccagggactacctcaagggcttttgatgaggacaagtgacagtaggaagatgcaagagcctttagtaccaaggttctcaacactgactacatgctggaatgactgtgaagcttttaaaaaatgttagtgcccactcttcccctgtacccccggacagttaaatcagaacctcagacagcaatatgccttgagatgccttgaaccatgcttgaga

SEQ ID NO: 337 - DNA, 468 bp, Homo sapiens
  misc_feature (0)...(0): n is c, t, a or g
ggcgctgatgcgaatacagctcacagagaaacgcatgtgctattggagaacaggtctttgtggagatctaaaggcagtgattgatttcacagggagctctaatctctgtgattacatggtccttcaaactcccaaccaaagtgagaaaagcggcatgcagtgaaatgagcagtgagcagccctttagcaaaatcgccctccagtccttcctggagatgccttcagccagcatcccagactccacagttatttatgaangatgtcgtgattctccctccacctgacagtttgtaagagtgaaagagcatctaacctgatgctcttggagagagataacctgtctgtcataacttaaaggatgagaaaatgtggtgtagctattaaagattcatgcagtcccaaaaggcactgtcctgggatgatgagagattataaggtgatttcataaaaggaatccaaccctgtgcc

SEQ ID NO: 338 - DNA, 370 bp, Homo sapiens
gaagccttactacaattccaaaaatcatcatggttggaaatttgggaggagattatttgtgaacttgttacccttttggtaatggtggactaattgctgtatagttatttttgttttattattactgttacattaatttaacatgcatttatagaagaatacattcaaagcactgatgtaggagatacacggtacttggagcagtcagccaaaaatcacagatactgctttcacttaaatggaaacaattctccgataatgctttgctttttttcttatgtcactcttgtgtactatctatttttctcctctctgggaccaagtttctttttataaagcaataatatctctgttttcatttcagaacatt

SEQ ID NO: 339 - DNA, 406 bp, Homo sapiens; identical to SEQ ID NO: 184

SEQ ID NO: 340 - DNA, 414 bp, Homo sapiens
acatatgtcggctaccgtgtctggccgttcacatctttggccactatttgcttgtgaaaaggtataatgaggtggtacttatcatttttactgtgtctcatgttttgtatatttttgtttcatcaactaagatgcactgtaacatctctgaaatctggatatattatcaatggtttatcatagttttgttagcaatacactgtcttttagtggtgcctaaaataatggtatagttgtgaggtgatcttagatttgatgaagcacagtatgcaggtaggcctaatgggggaagatggtaatataaaagcaagaagtattttttttttgtaatgactgaaagctgttctgtggatgacctaccctttcctttaaacacgattctctcacttccaactccaaacttgctcaactaat

SEQ ID NO: 341 - DNA, 461 bp, Homo sapiens; identical to SEQ ID NO: 185
  misc_feature (0)...(0): n is c, t, a or g

SEQ ID NO: 342 - DNA, 536 bp, Homo sapiens; identical to SEQ ID NO: 187
  misc_feature (0)...(0): n is c, t, a or g

SEQ ID NO: 343 - DNA, 453 bp, Homo sapiens
  misc_feature (0)...(0): n is c, t, a or g
gaaactctggaaatcacgtgtgtggggagatggggacgcttcccatgttgtggggagctctgtggctgtgatggctgcagttgccgtgcctctgttggaacgcnaagtgcctgcaactcacgtcaatcatagaattgtgacgcacagttggcaaaatagttctttatgctatttctcaaaantttgaggacaaacccagattgggattggaatatgcactgtaaatcaaatttttcttatctacaaagactaatgtaaaaatgattttttcttctgtgcctgattaaattaactgtggtttttaatataaatatttattggtgtgctttgggagaaaaattatcttttcttgaaagaanttatcaaagcaaatttattatcttcacaagttaatgggagaatgtggttttgattctgggtgtttgaattgtgtaaacacacagcttccttgtg

SEQ ID NO: 344 - DNA, 373 bp, Homo sapiens
  misc_feature (0)...(0): n is c, t, a or g
caacattctcttctcaaacactgaccaaggaacagaggaagatgcagtcagagaaagnagcaggatagagacgccgagagaggagtatatgtgggtcacagcagtgagctcccacccgccttgcagtgaagatgtgaccccaggagagggagtgtctccttccaggtgctagctctggacagcagctgattttaggcaggaaagtttcttcatcgttgtcctccctgctggtcacatgagtttacgattccttagaagtgtctcccacagggtggcaggactgggagaatctctgaggcgtgtcttccaggccctcccacagcttgtgccctccacagtgtagacttgaacacttggcctcatgtgatccttc

SEQ ID NO: 345 - DNA, 543 bp, Homo sapiens
ggtcaggggatcagacactccagttgggtcttttatataaattaaatggcaaaaggctccatacccttctccttctttcctaccctccactttatctgcaaaatgggaatgatgataacacccacttcatagaatggtcatgaagatcaaatgagagaataaaagtcaagcacttagcctctggtgcacaataagtattaaataagtatacctattcctccttttccttttttaaaaataatattaccaaatgtccagcttatacacatttacaagacttagctagtgggctatgttagagctactaaaagatctttgacaagctaaaactaagatgcaatgaatgaggtgtaacgaacaagagagttttaagttcagaaatggttacagaagtataagacagctgtgtgggtgttttttggtttttggtttctggtttacaatctcgtcattcaacaaagatgggagttttatagaactaaaagcaccatgtaagctactaaaaacaacaacaaaaaaggctcatcatttctcagtctgaat

SEQ ID NO: 346 - DNA, 474 bp, Homo sapiens; identical to SEQ ID NO: 213

SEQ ID NO: 347 - DNA, 525 bp, Homo sapiens
  misc_feature (0)...(0): n is c, t, a or g
cacacgcagatcctgcactgtactgtccagtcaactgacttcagcaaagatgtctgggttcagcagcgagttgctgtgtgaggccaccagaatggaggtgatatcggcctcagtgctcatcctggaggtggagaagtggtcagagtcctctgtggtgaaatggccctacaccaaagtgggagacattcagaatcgaggcgaaattggcctcagtgctcctcttggaggcagagaagcagtaggagtcggtggtgaaatggccctgtgtgaatgtggaagaccagcagattggaggtggaattggcctcagtgcttgtcctggaggtggagaagcggtcagagtccttggtggtgaagtggccctgcacaaaacgttgctcccccttggccggtgaaagaataaaagaaagctggccncttgcatttcngtttcagttnanagaanacatgttttggaaatagtatcttctagatctgtctttttctcttctgatttaacttagtaaagctaagttttatctcttc

SEQ ID NO: 348 - DNA, 351 bp, Homo sapiens; identical to SEQ ID NO: 15
  misc_feature (0)...(0): n is c, t, a or g

SEQ ID NO: 349 - DNA, 442 bp, Homo sapiens; identical to SEQ ID NO: 221
  misc_feature (0)...(0): n is c, t, a or g

SEQ ID NO: 350 - DNA, 435 bp, Homo sapiens; identical to SEQ ID NO: 230
  misc_feature (0)...(0): n is c, t, a or g

SEQ ID NO: 351 - DNA, 445 bp, Homo sapiens
  misc_feature (0)...(0): n is c, t, a or g
cctcggctcctcatctgaagagaagttgaacttaactgctaagttgctctggctctaatgtttcatgaggctgtggagcgtgatatagatgcggaagaggttagaagaccaggntgccggccnagctgtcctgtgcctgccacatctggccataccaaatccatcgcatgcttcaggaaagggaggggatgctgtgacagcaaactcagcccaggagcttgttggggaaggagaaagggcaagtccctcgtggtccacagcaggcaccccccaagcacctcgataaccagtggcaggtaggctgaagtgaaggaagcctctgtcaggaggtctggcgcccagtgacagacaagacagctgtgagggagctggggcagccctggctaaaggaatgtctgagtaacttgtgaaactggaagcctctgcctctgaatgcattccaaga

SEQ ID NO: 352 - DNA, 348 bp, Homo sapiens
  misc_feature (0)...(0): n is c, t, a or g
acataccttgggttgatccacttaggaacctcagataataacatctgccacgtatagagcaattgctatgtcccaggcactctactagacacttcatacagtttagaaaatcagatgggtgtagatcaaggcaggagcaggaaccaaaaagaaaggcataaacataagaaaaaaaatggaaggggtggnaaacagagtacaataacatgagtaatttgatgggggctattatgaactgagaaatgaactttgaaaagtatcttggggccaaatcatgtagactcttgagtgatgtgttaaggaatgctatgagtgctgagagggcatcagaagtccttgagagcctcc

SEQ ID NO: 353 - DNA, 400 bp, Homo sapiens
  misc_feature (0)...(0): n is c, t, a or g
atttcacggcaaagctttagaggtctacactgctgcctaccagaatatacaaaacattgatgaagatgaagatttagaggttttccnaaattctctgtatgcaccagattattcatctcgtttagatattgtaagagcaaattcaaagtcacctcttcagagatcactgtcagctaagtgtgtatctggaacaggacaggtatccacttgtcgactaagaaaggatcaacaagcagaagatgatgaggatgacgagttagatgttacagaagaagaaaattttcttaagtaaactacacatttccattttcatcataaatgacttgaaatccacaatgactaaattgtagaactttatactcactttgctatgttaagcctcaaagtgaagtccaactgg

SEQ ID NO: 354 - DNA, 393 bp, Homo sapiens
ataccttcacaatctgaactttctctagatgggcacagatcatgaataactcagaaaccattagcatattgtgtgcttaattaaggctggaaagtgctgaggctttttgcaggcgcagttagcaggcgaactggtcagcagggtttctggggaacgtagatttgcgtgacaggggccctgtgttgctaaggaattaatgcaggcactgagaaaagtctcagcgtcagacactcctccacctcccgggtcctgcttccctccctctcccctttccaggcaactcacagtttaggggtgtggttgtgtgtgttcaagctcttgggttttacatataaatgcctgagacttttctgcagggtttaaaaactaacatcttgtcttacagctctttta

SEQ ID NO: 355 - DNA, 352 bp, Homo sapiens
ggaaatcaagatctgcgtgctgggtatgttcattgctactggggtgtcattgcttctaggccttttcaactgacagggtcagtaatggagtaaaactcattgtaatcgtgtaacttatgtgggttaagaaattgaactttgctagtaccccagaagctcctttatgtcccctcctgattttaacgcttaatcaccttcatcctcagttttatggtaatcacttgtctttgcagttttagtctgtaaccatgcatccctaaataaatgtttagattgcctattttaaaaatttaatataattggttcaatgtgtgcatttcatgtatgacttcttttatgtctgtgatgttca

SEQ ID NO: 356 - DNA, 408 bp, Homo sapiens
  misc_feature (0)...(0): n is c, t, a or g
tgaggcagtgcatgttcttggcccagagtaagtgcttagtgaatgctttctaactccgaaccccagccacatccagggactgggtgttgagcaaaaggggccttcaagatgttcaaggcacttggattttctcctgtctctcatcggcttttcttaacgggcctcagtgggtgcatgtgattatccacgtttcacctatgaaacatgaacagaggagactgacttatcagtgattcttccgcgggttcggacagggcctcgattctgttttaaactccagtagtccctagaaattgtagctccctctagttgtggcaataggtgtgggtccttgtgcttgcttttggcaagtttntgagctacacagggcctccattaccgtcactggtgaaatgcggctcacctccc

SEQ ID NO: 357 - DNA, 405 bp, Homo sapiens
atgtcaggtttgtacctaccacatttaaaatagggacttgaagaattaaacattttattacaaatgaagcacttcatgcacagactggcacatagtaagtagtcgataggtgttaacaatttgtgttattgttattttctggagtccaactaacaaatcccacagtgaatgacatcacagggatgcaaccaacaagatccagaatatggaaacttctactagataaacaactccatttcttcagcaacaattcaagagagagagagaagagaagctatacattttaaaaggctgaagaaatatatgaaccaaatttgtatgaggcaatcagaaaaactgacaccgactgtattaaggaattatctaattttagtgtggtaatgagattgctgttatgttttctaa

SEQ ID NO: 358 - DNA, 308 bp, Homo sapiens
  misc_feature (0)...(0): n is c, t, a or g
aactagatttttgaccctcactcatctggctttccttgctatagacatgctttgcatacccagcttctagccacatcttccctaagaaaatttcancctggaatcagttccaaaagaaaatcttaagagatagagtatggatctgcatgttgtcagctacctaaagcagcaaaaattcctagatgagaataaaatcagggaaccttgcagtttaaggcacaccttaaatattaaatttttaatccttcaatgcatccagccaaaacaagaaattgcaaatagctaccatccatcaatgcaaggttttt

SEQ ID NO: 359 - DNA, 444 bp, Homo sapiens
gaaactcatgtgtcctcatggatcgtggatgccttcatttcttgagctctcaatgcagacatttaaatggctgcaatcagtagagtgacccgcggatggcataaatgcacctccttttcttggccttggatctatgggtctgggattgtggtcatctcctcaatcctcaaaaagaggctgaatcaatgtggccgtgggtgggaacttacatacagaacccaatgaagaacttgactgtctaaacaagggggcctcgcatggagctgtaaagcatctaacaaatatgaaaaatgtgaagttccaaggtccaagaagaaaaataatgatgtttctgaaagtgatgataaataattacttttaaagtgctgcatatttatacaattgagagattatttttgtaaatgcaatgtctgtgagctgggatacatgggcagtgcttcagac

SEQ ID NO: 360 - DNA, 138 bp, Homo sapiens
  misc_feature (0)...(0): n is c, t, a or g
tatttttaatgccttttcctgggataagcattaaagatgnccnaaaagaaaanaaaaacnaaagaatgatagtgatggtaaggcaagattctagcaaagagagatgggagataaatggctgagagttcaggtgaatat

SEQ ID NO: 361 - DNA, 438 bp, Homo sapiens
  misc_feature (0)...(0): n is c, t, a or g
ggcagcagtggcatggacaagcaactgctaattcgagacttactattggcttcacagcacaccctacagtgagcagggtgatgagaccgtggaacagctacctgcttttggttaagattgccagatatcattaggacacagtagcagcaagaatgctgattttgtagtgttagaaaatgaactcagcttgtttttcctaattttgaaggtggtatatatctgcaaacatttaaaatggtntaatatcatataaaatgtcaaaattagcacagtccctggatctcaaagaataggtaatattgacttggatgttctttatgctctctgaagaaaggtctagggaaagttcttgtttgcttgattgatcaagagtgccacggaagaatgtgagcgctgtggagggtggaggagggtgtcacttcagatggggcaggcaca

SEQ ID NO: 362 - DNA, 412 bp, Homo sapiens; identical to SEQ ID NO: 249
  misc_feature (0)...(0): n is c, t, a or g

SEQ ID NO: 363 - DNA, 286 bp, Homo sapiens
  misc_feature (0)...(0): n is c, t, a or g
ttgcctgcggagcacgggtgggcattggatgtaaggtattcctaacttccccttccccagtccttggcgtcctctctanccatcccaccccaggtcttctgcagcttcaccctgtcctccaagtcccctcgcccagctgcgagncaggagaccccgnccggantccgccagcaggnccttctttcgcagggcgcanacgcacgatnccgggatcgggtgcaccacngcgaancccangcgggagacggcaggagcagctcaggtaaccaggggaagcttgcgtgcc

SEQ ID NO: 364 - DNA, 319 bp, Homo sapiens; identical to SEQ ID NO: 254
  misc_feature (0)...(0): n is c, t, a or g

SEQ ID NO: 365 - DNA, 536 bp, Homo sapiens; identical to SEQ ID NO: 259
  misc_feature (0)...(0): n is c, t, a or g

SEQ ID NO: 366 - DNA, 286 bp, Homo sapiens
  misc_feature (0)...(0): n is c, t, a or g
ttaatttctgtgaagagtgcccctggtgtttcatcttggcctgttttgatgagaatgttatcntttgtgtctggataacgcgtcagcttcttaaagtacatataaagatattctgtcaccnccccacatgcacacacttttaaaatctatttttattctcttgctaaagttgtaattatgtcaagaattttccagctctaactgccttcttagtacatgtctttctgcctttgaagcatatgagtttgccaaagtcattctcccctaatgacatattgtggactta

SEQ ID NO: 367 - DNA, 259 bp, Homo sapiens; identical to SEQ ID NO: 265
  misc_feature (0)...(0): n is c, t, a or g

SEQ ID NO: 368 - DNA, 107 bp, Homo sapiens
agctgcgcaagatccaggcgcggatgggcgtgttcgcgcaggctgacggctcggcctacattgagcagggcaacaccaaggcactggctgtggtctacggcccgcac

SEQ ID NO: 369 - DNA, 354 bp, Homo sapiens; identical to SEQ ID NO: 269
  misc_feature (0)...(0): n is c, t, a or g

SEQ ID NO: 370 - DNA, 153 bp, Homo sapiens
  misc_feature (0)...(0): n is c, t, a or g
tcccccctggacaactgtatacccaagacagtccccagggcctcgcctgtctcccccagcccccgntaagcagtccagactccaaccccaactgctggggtccatcatcccctataccaggggctatcccctcaacttggagggctggccaaa

SEQ ID NO: 371 - DNA, 419 bp, Homo sapiens
  misc_feature (0)...(0): n is c, t, a or g
catctaccctgataacaccacagattttcaaagagcagatgacaaagtatatccaggagagcagtatacatacatgttgcttgccactgaagaacaaagtcctggggaaggagatggcaattgtgtgactaggatttaccattcccacattgatgctccaaaagatattgcctcaggactcatcggacctttaataatctgtaaaaanngattctctagataaagaaaaangaaaaacatattgaccgagaatttgtggtgatgttnnctgtggtggatgaaaatttcagctggtacctagaagacaacattaaaacctactgctcagaaccagagaaagttgacaaagacaacgaagacttccaggagagtaacagaatgtattctgtgaatggatacacttttggaagtctcccagg

SEQ ID NO: 372 - DNA, 227 bp, Homo sapiens
ttttgcatgtctgacacccatgactccacctggaccttatggctccacccagaagcaattcagcccaacaggaggacagcttcaacccattacgatttcatctctgccccaaccactcagcagcaagcacctgttacctgtccacccccaccccttcccccaaactgcctttgaaaaatccctaacctatgagctttgaataagatgagtacgaacttcatcgccca

SEQ ID NO: 373 - DNA, 218 bp, Homo sapiens
gcttcctttgagaacaagtttgagttttagtaagctgtaaagctgttttatttgattcactgtgaataagacaagtacaaaaaaaaaagtgaaaacacagcacatttcaagtgtaatcccctttggaatttttccaaagtcttagtatatgtctttgtgacagaaaaacatagatgggacaggtaaatgaaatgttcctagttgcatagctgttaacc

SEQ ID NO: 374 - DNA, 256 bp, Homo sapiens
  misc_feature (0)...(0): n is c, t, a or g
attcctgggctcgagagagccactcatccccatctctcagagtgttgggattacagccatgagccaccatgcccggccaaacttcagccttgaatattagtgattttgccatattagtttaccatctgtacaattatttgctttatntttttctttaaattggctcattattcacttaatgaaattattgcaacaggaatcttttgtatcacttctgtaaatggaaaaccagtctcatttgccatcaatagaaggt

SEQ ID NO: 375 - DNA, 75 bp, Homo sapiens; identical to SEQ ID NO: 271

SEQ ID NO: 376 - DNA, 206 bp, Homo sapiens; identical to SEQ ID NO: 1

SEQ ID NO: 377 - DNA, 418 bp, Homo sapiens; identical to SEQ ID NO: 2

SEQ ID NO: 378 - DNA, 544 bp, Homo sapiens; identical to SEQ ID NO: 274
  misc_feature (0)...(0): n is c, t, a or g

SEQ ID NO: 379 - DNA, 550 bp, Homo sapiens; identical to SEQ ID NO: 275

SEQ ID NO: 380 - DNA, 388 bp, Homo sapiens; identical to SEQ ID NO: 276

SEQ ID NO: 381 - DNA, 543 bp, Homo sapiens; identical to SEQ ID NO: 33

SEQ ID NO: 382 - DNA, 366 bp, Homo sapiens
tttataattctactttgagtgctgtctccatgtttgatgtatctgagcaggttgctccacaggtagctctaggagggctggcaacttagaggtggggagcagagaattctcttatccaacatcaacatcttggtcagatttgaactcttcaatctcttgcactcaaagcttgttaagatagttaagcgtgcataagttaacttccaatttacatactctgcttagaatttgggggaaaatttagaaatataattgacaggattattggaaatttgttataatgaatgaaacattttgtcatataagattcatatttacttcttatacatttgataaagtaaggcatggttgtggttaatctggttt

SEQ ID NO: 383 - DNA, 278 bp, Homo sapiens; identical to SEQ ID NO: 279

SEQ ID NO: 384 - DNA, 248 bp, Homo sapiens
ctctacctcatatcagtttgctagcagaaatctagaagactgtcagcttccaaacattaatgcaatggttaacatcttctgtctttataatctactccttgtaaagactgtagaagaaagcgcaacaatccatctctcaagtagtgtatcacagtagtagcctccaggtttccttaagggacaacatccttaagtcaaaagagagaagaggcaccactaaaagatcgcagtttgcctggtgcagtggc

SEQ ID NO: 385 - DNA, 367 bp, Homo sapiens
gattatcaattaccacaccatctcccatgaagaaagggaacggtgaagtactaagcgctagaggaagcagccaagtcggttagtggaagcatgattggtgcccagttagcctctgcaggatgtggaaacctccttccaggggaggttcagtgaattgtgtaggagaggttgtctgtggccagaatttaaacctatactcactttcccaaattgaatcactgctcacactgctgatgatttagagtgctgtccggtggagatcccacccgaacgtcttatctaatcatgaaactccctagttccttcatgtaacttccctgaaaaatctaagtgtttcataaatttgagagtctgtgacccacttacc

SEQ ID NO: 386 - DNA, 422 bp, Homo sapiens
  misc_feature (0)...(0): n is c, t, a or g
aattgtcggattttccatgtcctcctttctcctttgtgcccagcctgagtcagcaccatcccgcattcagaacctcccagtgaaagggcagccttcattttgagaaggtggaaggtgttagggtttgggagacagctcatccaatctcccaagtctcatggtggatttgtgactgtgagagtttccggtttaaaatctgaaaagccagatatgcctgtttccttttcccagcaccatgcctgtggaggggacagtcagacccagaggtcctttacgtgtggatggagttcacaggcgaatagaggagaggaccaggggacgtggcttgtcccttttgtccaacaaagcattatatttttaagaatggcagncctgtttgctgaagtgttcataagataacaataggcttgaatctccaattc

SEQ ID NO: 387 - DNA, 286 bp, Homo sapiens; identical to SEQ ID NO: 54

SEQ ID NO: 388 - DNA, 411 bp, Homo sapiens; identical to SEQ ID NO: 282

SEQ ID NO: 389 - DNA, 410 bp, Homo sapiens; identical to SEQ ID NO: 55

SEQ ID NO: 390 - DNA, 388 bp, Homo sapiens
acagccacgaagatcctaccaaaatgaagcgcttcctcttcctcctactcaccatcagcctcctggttatggtacagatacaaactggactctcaggacaaaacgacaccagccaaaccagcagcccctcagcatccagcagcatgagcggaggcattttccttttcttcgtggccaatgccataatccacctcttctgcttcagttgaggtgacacgtctcagccttagccctgtgccccctgaaacagctgccaccatcactcgcaagagaatcccctccatctttgggaggggttgatgccagacatcaccaggttgtagaagttgacaggcagtgccatgggggcaacagccaaaataggggggtaatgatgtaggggccaagc

SEQ ID NO: 391 - DNA, 512 bp, Homo sapiens; identical to SEQ ID NO: 59

SEQ ID NO: 392 - DNA, 468 bp, Homo sapiens
gatttacaaaggtcctcccattgcaaagcagtgtttgtcctaatttatatattgtttttctagttcattttgtgtttccaacttttcatgtaaaattttaattatttttgaatgtgtggatgtgagactgaggtgccttttggtactgaaattctttttccatgtacctgaagtgttacttttgtgatataggaaatccttgtatatatactttattggtccctaggcttcctattttgttaccttgctttctctatggcatccaccattttgattgttctacttttatgatatgttttcataagtggttaagcaagtattctcgttacttttgctcttaaatccctattcattacagcaatgttggtggtcaaagaaaatgataaacaacttgaatgttcaatggtcctgaaatacataacaacattttagtacattgtaaagtagaatcctctgttcataatgaac

SEQ ID NO: 393 - DNA, 383 bp, Homo sapiens; identical to SEQ ID NO: 68

SEQ ID NO: 394 - DNA, 520 bp, Homo sapiens; identical to SEQ ID NO: 69

SEQ ID NO: 395 - DNA, 418 bp, Homo sapiens; identical to SEQ ID NO: 73

SEQ ID NO: 396 - DNA, 449 bp, Homo sapiens; identical to SEQ ID NO: 292

SEQ ID NO: 397 - DNA, 436 bp, Homo sapiens
  misc_feature (0)...(0): n is c, t, a or g
cagcccttgcattgcagaggggcccatgaaagaggacaggctacccctttacaaatagaatttgagcatcagtgaggttaaactaaggccctcttgaatctctgaatttgagatacaaacatgttcctgggatcactgatgactttttatactttgtaaagacaattgttggagagcccctcacacagccctggcctcngctcaactagcagatacagggatgaggcagacctgactctcttaaggaggctgagagcccaaactgctgtcccaaacatgcacttccttgcttaaggtatggtacaagcaatgcctgcccattggagagaaaaaacttaagtagataaggaaataagaaccactcataattcttcaccttaggaataatctcctgttaatatggtgtacattcttcctgattattttctacacatac

SEQ ID NO: 398 - DNA, 508 bp, Homo sapiens; identical to SEQ ID NO: 293

SEQ ID NO: 399 - DNA, 473 bp, Homo sapiens
tgaaggatggtgactgcgccatggcctggatctgctgcagtgtcctttcctgtggaggctccactcaaagctggcatcctcctatgtcacctagagtgtgggtcaaagcaatacacctacatgtagaatgtgatgtcagaactcaaacaggctcaccaggcagtgtgcttcttccttgcatgaggatgcaagatgcaacagtttgtcttcacattggaaggacacccctggatgcccctaaccactagacctgtaaaacttcactgcagtggccacttctgaatctctgtaaggtttatttatcttcacccctctggagagaagatgttttaccaaagcctctagtgtaccgtcctcctcttactcatccatcccagtcaacatgatgttgtcaatgaaataaaggaatttaatattctatagtatatccaggttctccagatctcttaagactgtactatagaggcctgggg

SEQ ID NO: 400 - DNA, 529 bp, Homo sapiens
ctttctatattgttatcagtccaggaaacaggtaaacagatgtaattagagacattggctctttgtttaggcctaatctttctttttacttttttttttcttttttctttttttttaaagatcatgaatttgtgacttagttctgccctttggagaacaaaagaaagcagtcttccatcaaatcaccttaaaatgcacggctaaactattcagagttaacactccagaattgttaaattacaagtactatgctttaatgcttctttcatcttactagtatggcctataaaaaaaataataccacttgatgggtgaaggctttggcaatagaaagaagaatagaattcaggttttatgttattcctctgtgttcacttcgccttgctcttgaaagtgcagtatttttctacatcatgtcgagaatgattcaatgtaaatatttttcattttatcatgtatatcctatacacacatctccttcatcatcatatatgaagtttattttgagaagtctacattgcttacattt

SEQ ID NO: 401 - DNA, 245 bp, Homo sapiens
ggatcaatgggtttaacttgggccggtactggacaaagcaggggccacaacagaccctctacgtgccaagattcctgctgtttcctaggggagccctcaacaaaattacattgctggaactagaagatgtacctctccagccccaagtccaatttttggataagcctatcctcaatagcactagtactttgcacaggacacatatcaattccctttcagctgatacactgagtgcctctgaacca

SEQ ID NO: 402 - DNA, 509 bp, Homo sapiens
gaaggatggcatcaccgttgtggactggccgtttgacgatggggcgcccccgcctggcaaggtagtggaagactggctgagcctggtgaaggccaagttctgtgaggcccccggcagctgcgtggctgtgcactgcgtggcgggcctggggcgggctccagtccttgtggcgctggcgcttattgagagcgggatgaagtacgaggacgccatccagttcatccgccagaagcgccgcggacgcatcaacagcaagcagctcacctacctggagaaataccggcccaaacagaggctgcggttcaaagacccacacacgcacaagacccggtgctgcgttatgtagctcaggaccttggctgggcctggtcgtcatgtaggtcaggaccttggctggacctggaggccctgccagccctgctctgcccagcccagcagggctccaggccttggctggccccacatcgccttttcctccccgacacctccgtgcacttgtgtccgaggag

SEQ ID NO: 403 - DNA, 489 bp, Homo sapiens
aaacctctcttagatctggaaccaaatgcaaggttactggctggggagccaccgatccagattcattaagaccttctgacaccctgcgagaagtcactgttactgtcctaagtcgaaaactttgcaacagccaaagttactacaacggcgacccttttatcaccaaagacatggtctgtgcaggagatgccaaaggccagaaggattcctgtaagggtgactcagggggccccttgatctgtaaaggtgtcttccacgctatagtctctggaggtcatgaatgtggtgttgccacaaagcctggaatctacaccctgttaaccaagaaataccagacttggatcaaaagcaaccttgtcccgcctcatacaaattaagttacaaataattttattggatgcacttgcttcttttttcctaatatgctcgcaggttagagttgggtgtaagtaaagcagagcacatatggggtccatttttgcacttgta

SEQ ID NO: 404 - DNA, 558 bp, Homo sapiens
aaataacatacgcactcaacttccttttctttcttccttcctttctttcttccttcctttctttctctctctctctttccttccttccttcctccttttctctctctctctctctctctctcttttcttgacagactctcgttctgtggccctggctggagttcagtggtgtgatcttggctcactgctacctctaccatgagcaattctcctgcctcagcctcccaagtagctggaactacaggctcatgccactgcgcccagctaatttttgtatttttcgtagagacggggtttcaccacattcgtcaggttggtttcaaactcctgactttgtgatccacccgcctcggcctcccaaagtgctgggattacaggcatgagccatcacacctggtcaactttcttttgattagtgtttttgtggtatatctttttccatcatgttactttaaatatatctatattattgtatttaaaatgtgtttcttacagactgcatgtagttgggtataatttttatccagtctaaaaatatctgtcttttaattggtgttt

SEQ ID NO: 405 - DNA, 405 bp, Homo sapiens; identical to SEQ ID NO: 83

SEQ ID NO: 406 - DNA, 561 bp, Homo sapiens; identical to SEQ ID NO: 85

SEQ ID NO: 407 - DNA, 540 bp, Homo sapiens; identical to SEQ ID NO: 96

SEQ ID NO: 408 - DNA, 555 bp, Homo sapiens
gcagatttcttgcttcatatgacaaagcctcaattactaattgtaaaaactgaactattcccagaatcatgttcaaaaaatctgtaatttttgctgatcgaaagtgcttcattgactaaacagtattagtttgtggctataaatgattatttagatgatgactgaaaatgtgtataaagtaattaaaagtaatatggtggctttaagtgtagagatgggatggcaaatgctgtgaatgcagaatgtaaaattggtaactaagaaatggcacaaacaccttaagcaatatattttcctagtagatatatatatacacatacatatatacacatatacaaatgtatatttttgcaaaattgttttcaatctagaacttttctattaactaccatgtcttaaaatcaagtctataatcctagcattagtttaatattttgaatatgtaaacacctgtgttaatgctttgttaatgcttttcccactctcatttgttaatgctttcccactctcgggaaggatttgcattttgagctttatctctaaatgtgacatgca

SEQ ID NO: 409 - DNA, 571 bp, Homo sapiens; identical to SEQ ID NO: 304

SEQ ID NO: 410 - DNA, 432 bp, Homo sapiens; identical to SEQ ID NO: 98

SEQ ID NO: 411 - DNA, 492 bp, Homo sapiens; identical to SEQ ID NO: 306

SEQ ID NO: 412 - DNA, 482 bp, Homo sapiens; identical to SEQ ID NO: 102

SEQ ID NO: 413 - DNA, 550 bp, Homo sapiens; identical to SEQ ID NO: 308

SEQ ID NO: 414 - DNA, 532 bp, Homo sapiens
aaaggccacactggtgtgcctggccacaggtatcttccctgaccacgtggagctgagctggtgggtgaatgggaaggaggtgcacagtggggtcagcacggacccgcagcccctcaaggagcagcccgccctcaatgactccagatactgcctgagcagccgcctgagggtctcggccaccttctggcagaacccccgcaaccacttccgctgtcaagtccagttctacgggctctcggagaatgacgagtggacccaggatagggccaaacccgtcacccagatcgtcagcgccgaggcctggggtagagcagactgtggctttacctcggtgtcctaccagcaaggggtcctgtctgccaccatcctctatgagatcctgctagggaaggccaccatgtatgctgtgctggtcagcgcccttgtgttgatggccatggtcaagagaaaggatttctgaaggcagccctggaagtggagttaggagcttctaacccgtcatggtttcaatacacattcttcttttgccagc

SEQ ID NO: 415 - DNA, 484 bp, Homo sapiens
ggaacaagacttcaggtcacgctcgatatccagaaccctgaccctgccgtgtaccagctgagagactctaaatccagtgacaagtctgtctgcctattcaccgattttgattctcaaacaaatgtgtcacaaagtaaggattctgatgtgtatatcacagacaaaactgtgctagacatgaggtctatggacttcaagagcaacagtgctgtggcctggagcaacaaatctgactttgcatgtgcaaacgccttcaacaacagcattattccagaagacaccttcttccccagcccagaaagttcctgtgatgtcaagctggtcgagaaaagctttgaaacagatacgaacctaaactttcaaaacctgtcagtgattgggttccgaatcctcctcctgaaagtggccgggtttaatctgctcatgacgctgcggctgtggtccagctgagatctgcaagattgtaagacagcctgtgctccct

SEQ ID NO: 416 - DNA, 391 bp, Homo sapiens; identical to SEQ ID NO: 107

SEQ ID NO: 417 - DNA, 244 bp, Homo sapiens; identical to SEQ ID NO: 312

SEQ ID NO: 418 - DNA, 483 bp, Homo sapiens
gccatcagaagcagagatctcccacacccaaaaggccacactggtgtgcctggccacaggtttctaccccgaccacgtggagctgagctggtgggtgaatgggaaggaggtgcacagtggggtcagcacagacccgcagcccctcaaggagcagcccgccctcaatgactccagatactgcctgagcagccgcctgagggtctcggccaccttctggcagaacccccgcaaccacttccgctgtcaagtccagttctacgggctctcggagaatgacgagtggacccaggatagggccaaacctgtcacccagatcgtcagcgccgaggcctggggtagagcagactgtggcttcacctccgagtcttaccagcaaggggtcctgtctgccaccatcctctatgagatcttgctagggaaggccaccttgtatgctgtgctggtcagtgccctcgtgctgatggccatggtcaagagaaagga

SEQ ID NO: 419 - DNA, 447 bp, Homo sapiens
ggagccaatccatgcagatattttgttggaaacttataagaggaagattgctgatgaaggaagactttttctggctgaatttcagagcatcccgcgggtgttcagcaagtttcctataaaggaagctcgaaagccctttaaccagaataaaaaccgttatgttgacattcttccttatgattataaccgtgttgaactctctgagataaacggagatgcagggtcaaactacataaatgccagctatattgatggtttcaaagaacccaggaaatacattgctgcacaaggtcccagggatgaaactgttgatgatttctggaggatgatttgggaacagaaagccacagttattgtcatggtcactcgatgtgaagaaggaaacaggaacaagtgtgcagaatactggccgtcaatggaagagggcactcgggcttttggagatgt

SEQ ID NO: 420 - DNA, 498 bp, Homo sapiens
tcctccttgttctactcatatatatctatcttatatagtttactattttacttctagagatagtacataaaggtggtatgtgtgtgtatgctactacaaaaaagttgttaactaaattaacattgggaaatcttatattccatatattagcatttagtccaatgtctttttaagcttatttaattaaaaaatttccagtgagcttatcatgctgtctttacatggggttttcaattttgcatgctcgattattccctgtacaatatttaaaatttattgcttgatacttttgacaacaaattaggttttgtacaattgaacttaaataaatgtcattaaaataaataaatgcaatatgtattaatattcattgtataaaaatagaagaatacaaacatatttgttaaatatttacatatgaaatttaatatagctatttttatggaatttttcattgatatgaaaaatatgatattgcatatgcatagttcccatgtt

SEQ ID NO: 421 - DNA, 414 bp, Homo sapiens
  misc_feature (0)...(0): n is c, t, a or g
gtatcaaaatcttccaattatcatgctcacctgaaagaggtatgctctcttaggaatacagtttctagcattaaacaaataaacaaggggagaaaataaaactcaaggagtgaaaatcaggaggtgtaataaaatgttcctcgcattcccccccgcntttttttttttttttgactttgccttggagagccagagcttccgcattttctttactattctttttaaaaaaagtttcactgtgtagagaacatatatgcataaacataggtcaattatatgtctccattagaaaaataataattggaaaacatgttctagaactagttacaaaaataatttaaggtgaaatctctaatatttataaaagtagcaaaataaatgcataattaaaatatatttggacataacagactt

SEQ ID NO: 422 - DNA, 441 bp, Homo sapiens; identical to SEQ ID NO: 112

SEQ ID NO: 423 - DNA, 295 bp, Homo sapiens; identical to SEQ ID NO: 113
  misc_feature (0)...(0): n is c, t, a or g

SEQ ID NO: 424 - DNA, 378 bp, Homo sapiens
ggatgcttagcatgcaagttccctccatcattgccaccttggtagagagggatggctccccaccctcagcgttggggattcacgctccagcctccttcttggttgtcatagtgatagggtagccttattgccccctcttcttataccctaaaaccttctacactagtgccatgggaaccaggtctgaaaaagtagagagaagtgaaagtagagtctgggaagtagctgcctataactgagactagacggaaaaggaatactcgtgtattttaagatatgaatgtgactcaagactcgaggccgatacgaggctgtgattctgcctttggatggatgttgctgtacacagatgctacagacttgtactaacacaccgta

SEQ ID NO: 425 - DNA, 519 bp, Homo sapiens
  misc_feature (0)...(0): n is c, t, a or g
tgactccagatactgcctgagcagccgcctgagggtctcggccaccttctggcagaacccccgcaaccacttccgctgtcaagtccagttctacgggctctcggagaatgacgagtggacccaggatagggccaaacccgtcacccagatcgtcagcgccgaggcctggggtagagcagactgtggctttacctcggtgtcctaccagcaaggggtcctgtctgccaccatcctctatgagatcctgctagggaaggccaccctgtatgctgtgctggtcagcncccttgtgttgatggccatggtcaagagaaaggatttctgaaggcagccctggaagtggagttaggagcttctaacccgtcatggtttcaatacacattcttcttttgccagcgcttctgaagagctgctctcacctctctgcatcccaatagatatccccctatgtgcatgcacacctgcacactcacggctgaaatctccctaacccagggggaccttagcatgcctaagtga

SEQ ID NO: 426 - DNA, 419 bp, Homo sapiens; identical to SEQ ID NO: 318

SEQ ID NO: 427 - DNA, 435 bp, Homo sapiens
  misc_feature (0)...(0): n is c, t, a or g
gtttgagttttgtagggccatcacctggaaagtcaatgtgactagacacaaagtagcccagaggctacttttcttcctacagcttattatagttgtaggttctatgacctcacttcatgggttccaggcaattccgctgaaaggtttgtctcctgaaattttttaagtttgttttcctgacacatgtaatcagatgtgtagcaaccgagggaaacgaagcctaacattctccattgtggaaatacacacaggaggttacanttcacagcgtggatttttccagcttacacatgtgggatgacatcacagaaaccacaaaagcagcaaattaaactgtaggagagtcaatactcctgacgagtctcnggggggggcatttttatgccttcttaactttatgagaattctcaggctgaactataggccattgttccc

SEQ ID NO: 428 - DNA, 485 bp, Homo sapiens
  misc_feature (0)...(0): n is c, t, a or g
ggttcaccttggcatcaatttgccctgaaacttagctgtgctgggattattctccttgtcttggttgttactgggttgagtgtttcagtgacatccttaatacagaaatcatcaatagaaaaatgcagtgtggacattcaacagagcaggaataaaacaacagagagaccgggtctcttaaactgcccaatatattggcagcaactccgagagaaatgcttgttattttctcacactgtcaacccttggaataacagtctagctgattgttccaccaaagaatccagcctgctgcttattcgagataaggatgaattgatacacacacagaacctgatacgtgacaaagcaattctgttttggattggattaaatttttcattatcagaaaagaactggaagtgganaaacggctcttttttaaattctaatgacttagaaattagaggtgatgctaaagaaaacagctgtatttccatctcaca

SEQ ID NO: 429 - DNA, 516 bp, Homo sapiens
  misc_feature (0)...(0): n is c, t, a or g
tgagatgggagctgtcttcccagcccaccatccccatcgtgggcatcattgctggcctggttcnccttggagctgtgatcactggagctgtggtcgctgccgtgatgtggaggaggaagagctcaggtggagaaggggtgaaagatagaaaaggagggagttacactcaggctgcaagcagtgacagtgcccagggctctgatgtgtctctcacagcttgtaaagtgtgagacagctgccttgtgtgggactgagaggcaagagttgttcctgcccttccnnttgtgacttgaagaaccctgactttgtttctgcaaaggcncctgcatgtgtctgtgttcgtgtaggcataatgtgaggaggtggggagaccaccccaccccgatgtccaccatgaccctcttcccacgctgacctgtgctccctctccaatcatctttcctgttccagagaggtggggctgaggtgtctccatctctgtctcaacttcatggtgcactgagctgtaacttcttc

SEQ ID NO: 430 - DNA, 391 bp, Homo sapiens; identical to SEQ ID NO: 134

SEQ ID NO: 431 - DNA, 553 bp, Homo sapiens; identical to SEQ ID NO: 321
  misc_feature (0)...(0): n is c, t, a or g

SEQ ID NO: 432 - DNA, 541 bp, Homo sapiens
ggtctacgcctattacaacctggaggaaagctgtacccggttctaccatccggaaaaggaggatggaaagctgaacaagctctgccgtgatgaactgtgccgctgtgctgaggagaattgcttcatacaaaagtcggatgacaaggtcaccctggaagaacggctggacaaggcctgtgagccaggagtggactatgtgtacaagacccgactggtcaaggttcagctgtccaatgactttgacgagtacatcatggccattgagcagaccatcaagtcaggctcggatgaggtgcaggttggacagcagcgcacgttcatcagccccatcaagtgcagagaagccctgaagctggaggagaagaaacactacctcatgtggggtctctcctccgatttctggggagagaagcccaacctcagctacatcatcgggaaggacacttgggtggagcactggcctgaggaggacgaatgccaagacgaagagaaccagaaacaatgccaggacctcggcgccttcaccgagagcatggttgtc

SEQ ID NO: 433 - DNA, 531 bp, Homo sapiens
aatgtttaattgtttggatctgcacagtttggtttttgcacaaaagtcatttaaaaaaatctgagtaattgtcaaatattaaaagaaagatattcttcctgtaaggaatacagtttttagtcaaagtggccattacatcctctttttaatttacataatacagatacttgagaaagttgttgtggtgttgtatgccaagaaaattctttttattggtgcctatattgtaacaattatttttaatgcattgtattttgaagtaacggttcagttaaatttttcacctgctgtgtaactgaagcacaattacagtttataatcatctgtagaagtctggagataattttgcaactcatgttatgggttaaatgaatatttttgtaaaagtaaaagcaacaaatttataaattgattatttgaaactttacaacacaattgcatcccaaatacaaattgtattgcttattcattatagctattcgtcctgtaatctgtttctaggtgaagcatactccagtgttttaggggttt

SEQ ID NO: 434 - DNA, 493 bp, Homo sapiens
taaatctctggaccctggagcacttctaatgtatcaccccatggagtcattgttctaataatcaccaattcagactcagatcctcgtggtctatggagcatgctgcttgctgtctgtgcagctcccatttccccttcttcctgatagacttggagctgtgtgcctccactccaaggctgcctgcctgctgtaaacactattccactctgtctgccaacaactgcttcaggaatgggcctgagatcccatgcaggtccctgagaagtgagtaaaagtccgcagaggtggggatggaagatctctccttagatagaacctgtcttcctccctggcattgtggggtctgggcgtgacactgggactctcagcagctttgtgctgccaacctgagattgaaggcagtgcctcagagcagcacagagagttggggccccctgagccctgagccaccagccctgcagcctgccctatctccgcatttccagttgtatta

SEQ ID NO: 435 - DNA, 342 bp, Homo sapiens; identical to SEQ ID NO: 326
  misc_feature (0)...(0): n is c, t, a or g

SEQ ID NO: 436 - DNA, 299 bp, Homo sapiens
aacacctgtgctaggtcagtctggcacgtaagatgaacatccctaccaacacagagctcaccatctcttatacttaagtgaaaaacatggggaaggggaaaggggaatggctgcttttgatatgttccctgacacatatcttgaatggagacctccctaccaagtgatgaaagtgttgaaaaacttaataacaaatgcttgttgggcaagaatgggattgaggattatcttctctcagaaaggcattgtgaaggaattgagccagatctctctccctactgcaaaaccctattgtagta

SEQ ID NO: 437 - DNA, 392 bp, Homo sapiens
gaagagaaaaccactaaccttgatttttgtattgcaaaatcagatagacctggaaacataaatttaaatccttagacatttttctagaaaaaaatgcaaagtttataaagatgatacaaccatgatttgcaactgtaacaggagaccatttattataagcgtacctgtttgtgaacttaattattctgattccataagctgtttttgcttaggtgatccactgccatgtgatccataatttttctacataaaaaatcaaagttaaaagtcacattatacagttatgcattcatttcaacaaaatagtgaattgataatctacttgttaatatattcggcccatattttgtgtgtttggacaagtacatctcccttttgcctaatgaactttt

SEQ ID NO: 438 - DNA, 459 bp, Homo sapiens
cattaccaggttactcttgagatttttcaatggtgttagaactctcaaccaagacctgaaaaccaagtatgcaaggtttctgaatctctctggtagattaactattgacaatgattttctgttatctttgttcaaaaagttcatgtcttctcaaaatatgaaatattgataaatggaagagcatacggtgacaagtctcctttccaaccccaggttccctacaccctgctctcagcaggcagtgagtgtcacacacctgttaatccatcttgagcaggacagtactatacaaatagaatgcaagctgtaatgtaattttatattttcttatagccacgttgaagtaaaaacaaacaggtacagtgttttttaccagctttatagaagtacagttgttacatatttaatgaatacaatttgatgggtctgactatatgcacacacctttgataccatcac

SEQ ID NO: 439 - DNA, 492 bp, Homo sapiens; identical to SEQ ID NO: 330

SEQ ID NO: 440 - DNA, 386 bp, Homo sapiens
ttccccaaaactcaactcctatggcaattatgaactccattttaccaagaacatttaagtgcctcagcatctgtatgatatagtggagcaggtgctgacataggtaccagctgacatgatgtgtcactagctctgtgggatgattgccacatacatggaacacctgggagtgctggaaatgtactgggatcgaagtgacaaagtgtgttttcattcacagtggaggctacatcaagcaaggggaggtccagccctcttgcaagtgtggtgagaggctctactagcaaagacatgggcaccggagtaggtcccgtgtagcatgcgggtgctgtagagaaaattcagtgacgtacatggctctggttctggacacaaaatctgtactg

SEQ ID NO: 441 - DNA, 503 bp, Homo sapiens; identical to SEQ ID NO: 336

SEQ ID NO: 442 - DNA, 370 bp, Homo sapiens; identical to SEQ ID NO: 338

SEQ ID NO: 443 - DNA, 461 bp, Homo sapiens; identical to SEQ ID NO: 185
  misc_feature (0)...(0): n is c, t, a or g

SEQ ID NO: 444 - DNA, 497 bp, Homo sapiens
  misc_feature (0)...(0): n is c, t, a or g
ctaattggttctgcccaatctcctttcagattttattaggaaaaaaaaataaacctcctgatcggagacaatgtattaatcagaagtgtaaactgccagttctatatagcatgaaatgaaaagacagctaatttggtccaacaaacatgactgggtctagggcacccaggctgattcagctgatttcctaccagcctttgcctcttccttcaatgtggtttccatgggaatttgcttcagaaaagccaagtatgggctgttcagaggtgcacacctgcattttctnagctcttctagaggggctaagagacttggtacgggccaggaagaatatgtggcagagctcctggaaatgatgcagattaggtggcatttttgtcagctctgtggtttattgttgggactattctttaaaatatccattgttcactacagtgaagatctctgatttnaccgtgtactatccacatgcattacaaacatttcgcagagctgct

SEQ ID NO: 445 - DNA, 560 bp, Homo sapiens
gtctccgacacaaagcacttatctcttaggagattcccaagaaagtcaacaagatcttgttcccagggagtgggtcattggccaaagggaacataaggtaggcagaaaacttaaaagagtttgttaaagtgaagactggagaaattcctcccttcctctgagctgtgaatctctcttcatgaaagccaaaggtagagacagggaggacagggccaggttagggccttccacacacaaacacttctagagttgcccattcctgttatgttcttggaccctaagatacctcctgtcccttttaaatccagattaagagaaacgtccaggaagagctctttgaagccctcaatatttgttggagggactggactcctctccagctccccaccctctgcctccagtcaccatgtgcaagagaggtcctgtacagatctctctgggctctcctttctcctttggaataacttgttcctatttcaggaaagggaaatggtgtcactcaggccctgggactgcttctccagccaggctggggccacaggtcccactctagtgaaggt

SEQ ID NO: 446 - DNA, 476 bp, Homo sapiens; identical to SEQ ID NO: 202

SEQ ID NO: 447 - DNA, 335 bp, Homo sapiens
  misc_feature (0)...(0): n is c, t, a or g
tgcttttggtgcgatggcactcactgtgaacatgtgtaaccacatattaatatgcaatattgtttccaatactttctaatacagttttttataatgttgngtgtggtgattgttcaggtcgaatctgttgtatccagtacagctttaggtcttcagctgcccttctggcgagtacatgcacaggattgtaaatgagaaatgcagtcatatttccagtctgcctctatgatgatgttaaattattgctgtttagctgtgaacaagggatgtaccactggaggaatagagtatccttttgtacacattttgaaatgcttcttctgtagtgatagaac

SEQ ID NO: 448 - DNA, 446 bp, Homo sapiens
ttcccaggattctctttgggggtcattttgtgtgacagatatattttagacatttggagaaacagtttcagatcctgccaggatatttttgtaaaaaaggaaaatggaagattccaataaactagaaacagtacgtatctaagatgctgacacagaagctaatgtgacttttcagcttatcaagaggatggccaataaaacttaaaggtgtggttagatgttttctcacttttgtgacattaatttatcactgagtctcattcaaccaagtaatctaaaatactgtgcaaattctagcagtatgtcttcgataacttggatgttaggatagccaatatgtacaaaaaattaaatcaagtattttgtcctatgtataacacaaattaattttacacagagaaagatgtttctaggcaagtgaaattctggtaattcatactatttct

SEQ ID NO: 449 - DNA, 517 bp, Homo sapiens
tgttgcatttttcactcttaacccgagggtgtgtttcagcttatgttcgttctgtttcatgcaggtttatagcacggtagagtagaaggcggcttctgatttttagggtatttttagaattcattcctgagtgaggggttcagacacccagtctcctcggaacaggggtgaggggtcgactgagctttgttgagaagcctccagttaggcttcgggcgggtctccatgttatattgtgtgtttactgagcttcccactggtagaagatgacacatttgtccatcgtcctgtgtatctgctttccagaggacaccggagcattctcctggggtcactcccacatggctgcctcacatagctgttttgcaacagcctttattgccaacacccttggaagaacatctcctgtagaagtacaagttttgcaatatggactttggaagtggttttgtgatgttcgaattttctgttagcctattgctcaagcactacagaatgtacatagtccctttggcca

SEQ ID NO: 450 - DNA, 217 bp, Homo sapiens; identical to SEQ ID NO: 206

SEQ ID NO: 451 - DNA, 421 bp, Homo sapiens; identical to SEQ ID NO: 208

SEQ ID NO: 452 - DNA, 503 bp, Homo sapiens; identical to SEQ ID NO: 209
  misc_feature (0)...(0): n is c, t, a or g

SEQ ID NO: 453 - DNA, 525 bp, Homo sapiens; identical to SEQ ID NO: 347
  misc_feature (0)...(0): n is c, t, a or g

SEQ ID NO: 454 - DNA, 351 bp, Homo sapiens; identical to SEQ ID NO: 15
  misc_feature (0)...(0): n is c, t, a or g

SEQ ID NO: 455 - DNA, 413 bp, Homo sapiens
tgaagaaagttctcctcctgatcacagccatcttggcagtggctgttggtttcccagtctctcaagaccaggaacgagaaaaaagaagtatcagtgacagcgatgaattagcttcagggttttttgtgttcccttacccatatccatttcgcccacttccaccaattccatttccaagatttccatggtttagacgtaattttcctattccaatacctgaatctgcccctacaactccccttcctagcgaaaagtaaacaagaaggaaaagtcacgataaacctggtcacctgaaattgaaattgagccacttccttgaagaatcaaaattcctgttaataaaagaaaaacaaatgtaattgaaatagcacacagcattctctagtcaatatctttagtgatcttctttaata

SEQ ID NO: 456 - DNA, 442 bp, Homo sapiens; identical to SEQ ID NO: 221
  misc_feature (0)...(0): n is c, t, a or g

SEQ ID NO: 457 - DNA, 435 bp, Homo sapiens; identical to SEQ ID NO: 230
  misc_feature (0)...(0): n is c, t, a or g

SEQ ID NO: 458 - DNA, 441 bp, Homo sapiens; identical to SEQ ID NO: 234
  misc_feature (0)...(0): n is c, t, a or g

SEQ ID NO: 459 - DNA, 348 bp, Homo sapiens; identical to SEQ ID NO: 352
  misc_feature (0)...(0): n is c, t, a or g

SEQ ID NO: 460 - DNA, 242 bp, Homo sapiens
caagctaaaagagaacctcaggccaatgatcgagcggaaaattccagaactgtacaagccaatattcagagttgagagtcaaaagagaacattgtgctgtctgtcagcatatgtatatcagctacaaaatatattcaactttgacttcttttgacaaaggactttaggaaaaagaggaacaaagacattatttgagaattaaattatatatttttaatatgactgtgaccttgactgataat

SEQ ID NO: 461 - DNA, 305 bp, Homo sapiens
  misc_feature (0)...(0): n is c, t, a or g
accctgcactcccaaagattttgtgcagatgggtagttccnttttttaaaaattgtgcagatatggaaaattgtgacttacttcatgaccagaactatctagaatatgtgtgggggtataaacatcttgcttaaccaaatatctatgtaggcagaggtaaccaggagagaagcaagacttgctgcctaaaggagcccaccattttacttttcacatttaatctgccacgttgaatcaattggaataaaacctgactcgcaggtgactggacaggaaatcccaaagttccaccatttctatgctta

SEQ ID NO: 462 - DNA, 400 bp, Homo sapiens; identical to SEQ ID NO: 353
  misc_feature (0)...(0): n is c, t, a or g

SEQ ID NO: 463 - DNA, 393 bp, Homo sapiens; identical to SEQ ID NO: 354

SEQ ID NO: 464 - DNA, 408 bp, Homo sapiens; identical to SEQ ID NO: 356
  misc_feature (0)...(0): n is c, t, a or g

SEQ ID NO: 465 - DNA, 405 bp, Homo sapiens; identical to SEQ ID NO: 357

SEQ ID NO: 466 - DNA, 308 bp, Homo sapiens; identical to SEQ ID NO: 358
  misc_feature (0)...(0): n is c, t, a or g

SEQ ID NO: 467 - DNA, 444 bp, Homo sapiens; identical to SEQ ID NO: 359

SEQ ID NO: 468 - DNA, 404 bp, Homo sapiens
  misc_feature (0)...(0): n is c, t, a or g
gagagaatcctgcatctaacaattttaattttttnccctntatgctgttattccttacctagagaaacaatttccctccaaagttcctttgaggggtctgtttaggccaggccaacacaagtgacctatgtggattttagcatcctttttttgaaatttgaggttttatgaagcttgagtttttctggatatttttagtaatttgctggtgtgtacttagctcagatacttgattgcaactgtgttgggtcaactatttctaatgggacttttccatttgcatgtacagtcactggaaactgctgggcagagaaactctaaaaggtagttggggcacactttttccacctgtcagattggtgaagaattggtgaggctgtggggaaaatggcattctcccactt

SEQ ID NO: 469 - DNA, 319 bp, Homo sapiens; identical to SEQ ID NO: 254
  misc_feature (0)...(0): n is c, t, a or g

SEQ ID NO: 470 - DNA, 536 bp, Homo sapiens; identical to SEQ ID NO: 259
  misc_feature (0)...(0): n is c, t, a or g

SEQ ID NO: 471 - DNA, 320 bp, Homo sapiens
  misc_feature (0)...(0): n is c, t, a or g
gaaatggcacattttctggatgtgagagttggtcaaaagatcacaaaaaaagtcaaaaaataattctactctgtgaatgaaaaatggatatttnngtacttaccctcataagcattaaaagaaaataatgcatgaaattccatagaaatgtgcctatcatgttatactgactcaaaccagaagacctagagtatgatattgctaatataatacatgtggtgggtatgagtggaagtatgtgtgtgagatttatcattgccatagtgtaaaagagttgaattagcttccacttgactagatgagagctcttagttcttatt

SEQ ID NO: 472 - DNA, 259 bp, Homo sapiens; identical to SEQ ID NO: 265
  misc_feature (0)...(0): n is c, t, a or g

SEQ ID NO: 473 - DNA, 548 bp, Homo sapiens
  misc_feature (0)...(0): n is c, t, a or g
taatcggctcactataggaatttgcntcgaggccaagattcgnacgagnnngttcaaaagcagctaaaccaaaagaagcctccagacagccctgagatcacctaaaaagctgctaccaagacagccacgaagatcctaccaaaatgaagcgcttcctcttcctcctactcaccatcagcctcctggttatggtacagatacaaactggactctcaggacaaaacgacaccagccaaaccagcagcccctcagcatccagcagcatgagcggaggcattttccttttcttcgtggccaatgccataatccacctcttctgcttcagttgaggtgacacgtctcagccttagccctgtgccccctgaaacannnnnnnnnnnnnnnnnnnagagaatcccctccatctttgggaggggttgatgccagacatcaccaggttgtagaagttgacaggcagtgccatggggncaacagccaaaataggggggtaatgatgtaggggccaagcagtgcccagctgggggtcaataaagttacccttgtacttg

SEQ ID NO: 474 - DNA, 405 bp, Homo sapiens
  misc_feature (0)...(0): n is c, t, a or g
actgtggccgacctactatttttattatttttgagctnggttctcagtctgttggcagactggagtgcaatcatggctcactgcagccttgaactcccagactcaagtgatccttccacctcagcctctggagtagctgggactacagacatgcaccaccacacctggttaattttttatttttattttttgtngagacaggtgtctcnctacgttgcccaggctggtctcgaactcctgggctcaagtgatccacccatctccacctcccaaagtgctaggattacaggcgtgagccaccgtacccagcctggtcccatatcatagtgaaatggtgcctgtaaagctctcagcattggcttggcacatgcagttggtactcaataaacggctgttgctatcccc

SEQ ID NO: 475 - DNA, 347 bp, Homo sapiens
  misc_feature (0)...(0): n is c, t, a or g
ttctaagacccacatttggttattgaaggccacagcgaatcttaacctaacagccttgacaaactgcaccataggtgtttttagactcatataatttgttatttttcaaacaatagtgaataattaatattnttgtttggaatttgagnacaattaaatttgtacttttagtaactaccattctttgattagaaaattaagagaatgcatatcttactttggttgtaaattatcaagggctttctaatagaaatcatatataacatttctaaatataagtcctttcacatactgtgtttccagttgtcttgatattgaaaagtgtaataaacttcatgctcacctat

SEQ ID NO: 476 - DNA, 256 bp, Homo sapiens; identical to SEQ ID NO: 374
  misc_feature (0)...(0): n is c, t, a or g

SEQ ID NO: 477 - DNA, 500 bp, Homo sapiens
gaaaattcctggcagtttcaactgtgatagacattgctaacctgttctccaaagaggctgaaccaatttctgtttcctcaacagtgtatgactgtttcccccatctattctccagcactgaggattaagtaactttcatttttgtcagtctgacagatataaagcagaacatttctgcataaggttctacagtaatttttagattttatgaccctttggattatgcctacataatgatgatcaaatattcagaaactacattgtacctggccttaggcttggaattggatacaaaattaaatgaaaccagcttttgccctcaggttgatcccatctcctggagttggcagacaaatgaacaaataaaatgagagcaaaactgtatggttcacattgtgctagagaaatgcataagcttagctaacttttgtttgataaactctatattcattaatatcacaaatgaattcataaaataccgtatgcattatgtcccaggg

SEQ ID NO: 478 - DNA, 367 bp, Homo sapiens; identical to SEQ ID NO: 385

SEQ ID NO: 479 - DNA, 411 bp, Homo sapiens; identical to SEQ ID NO: 282

SEQ ID NO: 480 - DNA, 544 bp, Homo sapiens
taactctaccctggcactataatgtaagctctactgaggtgctatgttcttagtggatgttctgaccctgcttcaaatatttccctcacctttcccatcttccaagggtactaaggaatctttctgctttggggtttatcagaattctcagaatctcaaataactaaaaggtatgcaatcaaatctgctttttaaagaatgctctttacttcatggacttccactgccatcctcccaaggggcccaaattctttcagtggctacctacatacaattccaaacacatacaggaaggtagaaatatctgaaaatgtatgtgtaagtattcttatttaatgaaagactgtacaaagtataagtcttagatgtatatatttcctatattgttttcagtgtacatggaataacatgtaattaagtactatgtatcaatgagtaacaggaaaattttaaaaatacagatagatatatgctctgcatgttacataagataaatgtgctgaatggttttcaaataaaaatgaggtactctcctggaaatatt

SEQ ID NO: 481 - DNA, 544 bp, Homo sapiens
ggagtttgcattcttattcatcagggaggaaagtttctttgaaaatagttattcagttataagtaatacaggattattttgattatatacttgttgtttaatgtttaaaatttcttagaaaacaatggaatgagaatttaagcctcaaatttgaacatgtggcttgaattaagaagaaaattatggcatatattaaaagcaggcttctatgaaagactcaaaaagctgcctgggaggcagatggaacttgagcctgtcaagaggcaaaggaatccatgtagtagatatcctctgcttaaaaactcactacggaggagaattaagtcctacttttaaagaatttctttataaaatttactgtctaagattaatagcattcgaagatccccagacttcatagaatactcagggaaagcatttaaagggtgatgtacacatgtatcctttcacacatttgccttgacaaacttctttcactcacatctttttcactgactttttttgtgggggcggggccggggggactctggtatctaattcttta

SEQ ID NO: 482 - DNA, 438 bp, Homo sapiens
cagccacacgcgaaggtgaccttaaacttttacagctgacggaaaaagcaaaaattaacaaatatgtgactatccttcatctacctaaaaagggggatgatgtgaaaccaggaaccatgtgccaagttgcagggtgggggaggactcacaatagtgcatcttggtccgatactctgagagaagtcaatatcaccatcatagacagaaaagtctgcaatgatcgaaatcactataattttaaccctgtgattggaatgaatatggtttgtgctggaagcctccgaggtggaagagactcgtgcaatggagattctggaagccctttgttgtgcgagggtgttttccgaggggtcacttcctttggccttgaaaataaatgcggagaccctcgtgggcctggtgtctatattcttctctcaaagaaacacctcaactgga

SEQ ID NO: 483 - DNA, 436 bp, Homo sapiens; identical to SEQ ID NO: 397
  misc_feature (0)...(0): n is c, t, a or g

SEQ ID NO: 484 - DNA, 508 bp, Homo sapiens; identical to SEQ ID NO: 293

SEQ ID NO: 485 - DNA, 529 bp, Homo sapiens; identical to SEQ ID NO: 400

SEQ ID NO: 486 - DNA, 489 bp, Homo sapiens; identical to SEQ ID NO: 403

SEQ ID NO: 487 - DNA, 405 bp, Homo sapiens; identical to SEQ ID NO: 83

SEQ ID NO: 488 - DNA, 540 bp, Homo sapiens; identical to SEQ ID NO: 96

SEQ ID NO: 489 - DNA, 432 bp, Homo sapiens; identical to SEQ ID NO: 98

SEQ ID NO: 490 - DNA, 532 bp, Homo sapiens; identical to SEQ ID NO: 414

SEQ ID NO: 491 - DNA, 484 bp, Homo sapiens; identical to SEQ ID NO: 415

SEQ ID NO: 492 - DNA, 483 bp, Homo sapiens; identical to SEQ ID NO: 418

SEQ ID NO: 493 - DNA, 414 bp, Homo sapiens; identical to SEQ ID NO: 421
  misc_feature (0)...(0): n is c, t, a or g

SEQ ID NO: 494 - DNA, 358 bp, Homo sapiens
  misc_feature (0)...(0): n is c, t, a or g
cactgcagaatgaaggaacatcccttgaggtgacccagccaacctgtggccagaaggaggnttgtaccttgaaaagacactgaaagcattttggngtgtnaagtaagggtgggcagaggaggtagaaaatcaattcaattgtcgcatcattcatggttctttaatattgatgctcagtgcantggcctnagaatatcccagcctctcttctggtttgntgagtgctntntaagtaagcatggtngaattgtttggggncanatatagtganccttggtcactggtgtttcaaacattctggnaagtcacatcnatcaagaatantttttanttttaagaaagcataaccagcaataaa

SEQ ID NO: 495 - DNA, 519 bp, Homo sapiens; identical to SEQ ID NO: 425
  misc_feature (0)...(0): n is c, t, a or g

SEQ ID NO: 496 - DNA, 419 bp, Homo sapiens; identical to SEQ ID NO: 318

SEQ ID NO: 497 - DNA, 531 bp, Homo sapiens
  misc_feature (0)...(0): n is c, t, a or g
ccaacgcaaattcgcaaactttcttaaaacattatgagttncnntttgctatttttttttttttttttagctcatcggctatcgttagtgctagtggattttacatgtggcccnnnannnnnnnncnnncaacgtggcccagagaagccaaaagattggatacgcatcagacagatggaaaagggagattcagactgtttttcagggaggtggctgggtttacacgctaatcccgattcaccctgtccaaactgcctaagccctccgccattntcaagccctgcagtcacagctacacagatcacagcttcagccaggagctgggcagaaggccaanaggctgttcccaccaggctgctcagggntggtcttttaggacccttcccttgagccctntatggtgtggcaaagccttcattgccttaactggagccccatcagctccagctgctctgtnttntttgcccncaatgctttgcccctgagacaaatggaggcctgtcctgacctgtctcaccatgtacatagctt

SEQ ID NO: 498 - DNA, 553 bp, Homo sapiens; identical to SEQ ID NO: 321
  misc_feature (0)...(0): n is c, t, a or g

SEQ ID NO: 499 - DNA, 469 bp, Homo sapiens; identical to SEQ ID NO: 137

SEQ ID NO: 500 - DNA, 299 bp, Homo sapiens; identical to SEQ ID NO: 436

SEQ ID NO: 501 - DNA, 479 bp, Homo sapiens
gttctctcatttaatgcacactgatgatattgtagggatgggtggggtggggatcttgcaaatttctattctcttttactgaaaaagcaggggatgagttccatcagaaggtgcccagcgctacttcccaggtttttattttttttttcctatctcattaggttggaaggtactaaatattgaactgttaagattagacatttgaattctgttgacccgcactttaaagcttttgtttgcatttaaattaaatggcttctaaacaagaaattgcagcatattcttctctttggcccagaggtgggttaaactgtaagggacagctgagattgagtgtcagtattgctaagcgtggcattcacaatactggcactataaagaacaaaataaaataataatttataggacagtttttctactgccattcaatttgatgtgagtgccttgaaaactgatcttcctatttgagtctcttgaga

SEQ ID NO: 502 - DNA, 497 bp, Homo sapiens; identical to SEQ ID NO: 444
  misc_feature (0)...(0): n is c, t, a or g

SEQ ID NO: 503 - DNA, 335 bp, Homo sapiens; identical to SEQ ID NO: 447
  misc_feature (0)...(0): n is c, t, a or g

SEQ ID NO: 504 - DNA, 289 bp, Homo sapiens
gtactggcccttcggattgaaagtatacagtgatgaaatttgctgccactctttcatgcttggagtgttatattcttttggatgcgagccctcaaagaaacatttaatattctcttttgccaattcagttgcatgctctgtggctttacttttaaggatctgctgctcctgttccaaatagattttccagaatttcagctgcagaaaactaactggagataggcatcgggtgacagatgtaaaaatcagaagaatgatgataacaactgctatcaagatccagcccaac

SEQ ID NO: 505 - DNA, 413 bp, Homo sapiens; identical to SEQ ID NO: 455

SEQ ID NO: 506 - DNA, 262 bp, Homo sapiens
ggaacaggagcaactactaaaagagggatttcaaaaagaaagcagaataatgaaaaatgagatacaggatctccagacgaaaatgagacgacgaaaggcatgtaccataagctaaagaccagagccttcctgtcacccctaaccaaggcataattgaaacaattttagaatttggaacaagcgtcactacatttgataataattagatcttgcatcataacaccaaaagtttataaaggcatgtggtacaatgatcaaaatc

SEQ ID NO: 507 - DNA, 365 bp, Homo sapiens
aaaagatctctcactgggaaaagaaaaagttatgcatttataaagtaattaaactggttttccttgtactttattaatctgaatctaatggcacttccttacgagggttttcagatgtgcttgtagttaatggcaacattatcagaatgactacacagacagtcctactctgaggagatgactttggaagaaacccatttggaactacacaccctgctatgtctgtggagaaatggaactgcaatcctcaagagtcacacttcatattccttcctttcaagtggttgataaaaggtagtgcttcaagcacaggatttatggaatagttggcaaattaaacaacatgctttttattttgactacca

SEQ ID NO: 508 - DNA, 25 bp, artificial sequence
  antisense probe sequence
atgttcactgtatgtgccaagccta

SEQ ID NO: 509 - DNA, 25 bp, artificial sequence
  antisense probe sequence
actgtatgtgccaagcctaatatga

SEQ ID NO: 510 - DNA, 25 bp, artificial sequence
  antisense probe sequence
gtgccaagcctaatatgagagctat

SEQ ID NO: 511 - DNA, 25 bp, artificial sequence
  antisense probe sequence
ttatagagtttatgctacagcccta

SEQ ID NO: 512 - DNA, 25 bp, artificial sequence
  antisense probe sequence
agagtttatgctacagccctacctt

SEQ ID NO: 513 - DNA, 25 bp, artificial sequence
  antisense probe sequence
acagccctaccttcaggaaacttat

SEQ ID NO: 514 - DNA, 25 bp, artificial sequence
  antisense probe sequence
aggaaacttatctactggacaaaca

SEQ ID NO: 515 - DNA, 25 bp, artificial sequence
  antisense probe sequence
acattgtaattatctagcataggca

SEQ ID NO: 516 - DNA, 25 bp, artificial sequence
  antisense probe sequence
gcataggcaaatatagacagtaaca

SEQ ID NO: 517 - DNA, 25 bp, artificial sequence
  antisense probe sequence
aacagacaggtttacaattattaag

SEQ ID NO: 518 - DNA, 25 bp, artificial sequence
  antisense probe sequence
caattattaagaaagggcagccagg

SEQ ID NO: 519 - DNA, 25 bp, artificial sequence
  antisense probe sequence
taccatagcaagttcttatcctttg

SEQ ID NO: 520 - DNA, 25 bp, artificial sequence
  antisense probe sequence
acctgtcacagtaatatgccaattt

SEQ ID NO: 521 - DNA, 25 bp, artificial sequence
  antisense probe sequence
gccaatttttggtgtcgctttagta

SEQ ID NO: 522 - DNA, 25 bp, artificial sequence
  antisense probe sequence
gtctttcctcagttgtctcctaaaa

SEQ ID NO: 523 - DNA, 25 bp, artificial sequence
  antisense probe sequence
gatcgtcttgtgcagccctttaaaa

SEQ ID NO: 524 - DNA, 25 bp, artificial sequence
  antisense probe sequence
atgcgttttgcattcatgtctttgc

SEQ ID NO: 525 - DNA, 25 bp, artificial sequence
  antisense probe sequence
ctttcattttgggagtgactgtcat

SEQ ID NO: 526 - DNA, 25 bp, artificial sequence
  antisense probe sequence
acaccagggccagattgcgtgggtt

SEQ ID NO: 527 - DNA, 25 bp, artificial sequence
  antisense probe sequence
tgcgtgggttctagctagggaccta

SEQ ID NO: 528 - DNA, 25 bp, artificial sequence
  antisense probe sequence
agctggttacttgatttctctctgt

SEQ ID NO: 529 - DNA, 25 bp, artificial sequence
  antisense probe sequence
ttctctctgttccatttactatctg

SEQ ID NO: 530 - DNA, 25 bp, artificial sequence
  antisense probe sequence
agggctcatcgacatcgagaacccc

SEQ ID NO: 531 - DNA, 25 bp, artificial sequence
  antisense probe sequence
ggtcacacaactggatctggacggg

SEQ ID NO: 532 - DNA, 25 bp, artificial sequence
  antisense probe sequence
ggacgggccaaaggagctttcgagg

SEQ ID NO: 533 - DNA, 25 bp, artificial sequence
  antisense probe sequence
atgcacttggccgggaagacagagc

SEQ ID NO: 534 - DNA, 25 bp, artificial sequence
  antisense probe sequence
ggctggccatcatccggaaacagcg

SEQ ID NO: 535 - DNA, 25 bp, artificial sequence
  antisense probe sequence
gaggaggctgcccggaagaaggaag

SEQ ID NO: 536 - DNA, 25 bp, artificial sequence
  antisense probe sequence
aaagacgatgccacattgtcaggaa

SEQ ID NO: 537 - DNA, 25 bp, artificial sequence
  antisense probe sequence
ggaaaacgaatgcagtcactctccc

SEQ ID NO: 538 - DNA, 25 bp, artificial sequence
  antisense probe sequence
gcagtcactctccctgaataagtaa

SEQ ID NO: 539 - DNA, 25 bp, artificial sequence
  antisense probe sequence
taagtaactgcgacccgtgggagga

SEQ ID NO: 540 - DNA, 25 bp, artificial sequence
  antisense probe sequence
ggggtagctgctatctttgagacag

SEQ ID NO: 541 - DNA, 25 bp, artificial sequence
  antisense probe sequence
aggaaataacccagttctgcaccac

SEQ ID NO: 542 - DNA, 25 bp, artificial sequence
  antisense probe sequence
ccactggtttttgtagctatctcgt

SEQ ID NO: 543 - DNA, 25 bp, artificial sequence
  antisense probe sequence
ctatctcgtaaggctgctggctgaa

SEQ ID NO: 544 - DNA, 25 bp, artificial sequence
  antisense probe sequence
ctgaaaactgtgtctatgcaacctt

SEQ ID NO: 545 - DNA, 25 bp, artificial sequence
  antisense probe sequence
gcaaccttccaagtgcggagtgtca

SEQ ID NO: 546 - DNA, 25 bp, artificial sequence
  antisense probe sequence
gcggagtgtcaaccaactggacggg

SEQ ID NO: 547 - DNA, 25 bp, artificial sequence
  antisense probe sequence
cgggagagagtactgctcctactcc

SEQ ID NO: 548 - DNA, 25 bp, artificial sequence
  antisense probe sequence
ctactccaggactctcacaaagctg

SEQ ID NO: 549 - DNA, 25 bp, artificial sequence
  antisense probe sequence
aactggcaacatcttacagactact

SEQ ID NO: 550 - DNA, 25 bp, artificial sequence
  antisense probe sequence
gactactgacttgaagacaacctct

SEQ ID NO: 551 - DNA, 25 bp, artificial sequence
  antisense probe sequence
atgatggttacacttttggttccta

SEQ ID NO: 552 - DNA, 25 bp, artificial sequence
  antisense probe sequence
tcaagaattcactgatctgatgcaa

SEQ ID NO: 553 - DNA, 25 bp, artificial sequence
  antisense probe sequence
tatcattacatcttgaacccaggaa

SEQ ID NO: 554 - DNA, 25 bp, artificial sequence
  antisense probe sequence
atagataattccacgttgcctttgt

SEQ ID NO: 555 - DNA, 25 bp, artificial sequence
  antisense probe sequence
acgttgcctttgtgatttgtatata

SEQ ID NO: 556 - DNA, 25 bp, artificial sequence
  antisense probe sequence
atattttacttgttccatccacagt

SEQ ID NO: 557 - DNA, 25 bp, artificial sequence
  antisense probe sequence
ttccatccacagttctctacagaaa

SEQ ID NO: 558 - DNA, 25 bp, artificial sequence
  antisense probe sequence
aatggtctgttttcgtgatattcgt

SEQ ID NO: 559 - DNA, 25 bp, artificial sequence
  antisense probe sequence
gttaactagcattctgttttacatg

SEQ ID NO: 560 - DNA, 25 bp, artificial sequence
  antisense probe sequence
catgttgacatttctaacacacaca

SEQ ID NO: 561 - DNA, 25 bp, artificial sequence
  antisense probe sequence
cacacacaccactgatttgaacttc

SEQ ID NO: 562 - DNA, 25 bp, artificial sequence
  antisense probe sequence
atatatgctaggtctgattctgaag

SEQ ID NO: 563 - DNA, 25 bp, artificial sequence
  antisense probe sequence
gaagcatatccagagggcgaaagat

SEQ ID NO: 564 - DNA, 25 bp, artificial sequence
  antisense probe sequence
ggcgaaagatatctctccattgtgc

SEQ ID NO: 565 - DNA, 25 bp, artificial sequence
  antisense probe sequence
catctgcctcttttgacgttggaag

SEQ ID NO: 566 - DNA, 25 bp, artificial sequence
  antisense probe sequence
ggaagacacatgtcttactccccaa

SEQ ID NO: 567 - DNA, 25 bp, artificial sequence
  antisense probe sequence
tactccccaaagggagcccagcact

SEQ ID NO: 568 - DNA, 25 bp, artificial sequence
  antisense probe sequence
ggagccttcttgatgatctcaaaaa

SEQ ID NO: 569 - DNA, 25 bp, artificial sequence
  antisense probe sequence
gtgactgtgaaaccgtcagttcgga

SEQ ID NO: 570 - DNA, 25 bp, artificial sequence
  antisense probe sequence
gaaaccgtcagttcggaaggctggt

SEQ ID NO: 571 - DNA, 25 bp, artificial sequence
  antisense probe sequence
gaaggctggttagaacatgtgggag

SEQ ID NO: 572 - DNA, 25 bp, artificial sequence
  antisense probe sequence
gtgcttacaattttgtgtaccaact

SEQ ID NO: 573 - DNA, 25 bp, artificial sequence
  antisense probe sequence
gatttcattgctattgcatagtctc

SEQ ID NO: 574 - DNA, 25 bp, artificial sequence
  antisense probe sequence
gactatttcaaagctactgttccta

SEQ ID NO: 575 - DNA, 25 bp, artificial sequence
  antisense probe sequence
gttcctagtccagctttaagtttcg

SEQ ID NO: 576 - DNA, 25 bp, artificial sequence
  antisense probe sequence
gctgttttgtttcatgatttcgtta

SEQ ID NO: 577 - DNA, 25 bp, artificial sequence
  antisense probe sequence
gatgatggtgtcctttagggctctt

SEQ ID NO: 578 - DNA, 25 bp, artificial sequence
  antisense probe sequence
agggctcttggagcagccagaccat

SEQ ID NO: 579 - DNA, 25 bp, artificial sequence
  antisense probe sequence
agttgtcctggggctgaatgggcaa

SEQ ID NO: 580 - DNA, 25 bp, artificial sequence
  antisense probe sequence
gaatgggcaaatctgtccaaacagc

SEQ ID NO: 581 - DNA, 25 bp, artificial sequence
  antisense probe sequence
gctagtaaccggctgtgagggagag

SEQ ID NO: 582 - DNA, 25 bp, artificial sequence
  antisense probe sequence
gtcagaagcacttagcgttggcctc

SEQ ID NO: 583 - DNA, 25 bp, artificial sequence
  antisense probe sequence
atgattttctctaaatgcctgggta

SEQ ID NO: 584 - DNA, 25 bp, artificial sequence
  antisense probe sequence
ttcaaggagctcacttggcctgctt

SEQ ID NO: 585 - DNA, 25 bp, artificial sequence
  antisense probe sequence
tctcctcgtggatcgtgtatcccag

SEQ ID NO: 586 - DNA, 25 bp, artificial sequence
  antisense probe sequence
tcctcgtggatcgtgtatcccagcg

SEQ ID NO: 587 - DNA, 25 bp, artificial sequence
  antisense probe sequence
cgtgtatcccagcggcaaggtgtat

SEQ ID NO: 588 - DNA, 25 bp, artificial sequence
  antisense probe sequence
gtatcccagcggcaaggtgtatgtg

SEQ ID NO: 589 - DNA, 25 bp, artificial sequence
  antisense probe sequence
ccagcggcaaggtgtatgtggcagc

SEQ ID NO: 590 - DNA, 25 bp, artificial sequence
  antisense probe sequence
tgtggtgctgacctgtgagctatgc

SEQ ID NO: 591 - DNA, 25 bp, artificial sequence
  antisense probe sequence
gcagaggtgcgctggaccaaggatg

SEQ ID NO: 592 - DNA, 25 bp, artificial sequence
  antisense probe sequence
agctcgaggactccggcgagtactt

SEQ ID NO: 593 - DNA, 25 bp, artificial sequence
  antisense probe sequence
cgaggactccggcgagtacttgtgt

SEQ ID NO: 594 - DNA, 25 bp, artificial sequence
  antisense probe sequence
gactccggcgagtacttgtgtgaaa

SEQ ID NO: 595 - DNA, 25 bp, artificial sequence
  antisense probe sequence
aaattgacgatgagtcggcctcctt

SEQ ID NO: 596 - DNA, 25 bp, artificial sequence
  antisense probe sequence
gaaaaatccgtggaactgaagctga

SEQ ID NO: 597 - DNA, 25 bp, artificial sequence
  antisense probe sequence
actgaagctgagatctttagtacgt

SEQ ID NO: 598 - DNA, 25 bp, artificial sequence
  antisense probe sequence
gagatctttagtacgtggagtcacc

SEQ ID NO: 599 - DNA, 25 bp, artificial sequence
  antisense probe sequence
gtacgtggagtcaccttacagatac

SEQ ID NO: 600 - DNA, 25 bp, artificial sequence
  antisense probe sequence
ggagtcaccttacagatacagagca

SEQ ID NO: 601 - DNA, 25 bp, artificial sequence
  antisense probe sequence
tcaccttacagatacagagcattta

SEQ ID NO: 602 - DNA, 25 bp, artificial sequence
  antisense probe sequence
gagcatttatgcggtattcattggt

SEQ ID NO: 603 - DNA, 25 bp, artificial sequence
  antisense probe sequence
tatgcggtattcattggtgcctaaa

SEQ ID NO: 604 - DNA, 25 bp, artificial sequence
  antisense probe sequence
gtattcattggtgcctaaagaactt

SEQ ID NO: 605 - DNA, 25 bp, artificial sequence
  antisense probe sequence
aaagaactttaggcatcctctggaa

SEQ ID NO: 606 - DNA, 25 bp, artificial sequence
  antisense probe sequence
ttaggcatcctctggaaaaccggcc

SEQ ID NO: 607 - DNA, 25 bp, artificial sequence
  antisense probe sequence
gaacaggtgaccataactctgccaa

SEQ ID NO: 608 - DNA, 25 bp, artificial sequence
  antisense probe sequence
atgtggaattcagccaggactccca

SEQ ID NO: 609 - DNA, 25 bp, artificial sequence
  antisense probe sequence
gccaggactcccaatcttgtaaaac

SEQ ID NO: 610 - DNA, 25 bp, artificial sequence
  antisense probe sequence
agataagatgtccccagcatctcca

SEQ ID NO: 611 - DNA, 25 bp, artificial sequence
  antisense probe sequence
agttcatcagattccaaaagttcat

SEQ ID NO: 612 - DNA, 25 bp, artificial sequence
  antisense probe sequence
aagttcatcatcttcaagtagtgag

SEQ ID NO: 613 - DNA, 25 bp, artificial sequence
  antisense probe sequence
gattgcaaatcctctacttctgata

SEQ ID NO: 614 - DNA, 25 bp, artificial sequence
  antisense probe sequence
gaattgtgtctcaggacatcctacc

SEQ ID NO: 615 - DNA, 25 bp, artificial sequence
  antisense probe sequence
gacatcctaccatgacacagtacag

SEQ ID NO: 616 - DNA, 25 bp, artificial sequence
  antisense probe sequence
agatttcgagacaacagtggccttc

SEQ ID NO: 617 - DNA, 25 bp, artificial sequence
  antisense probe sequence
acagtggccttctgatgaatacttt

SEQ ID NO: 618 - DNA, 25 bp, artificial sequence
  antisense probe sequence
ataagtcatttctaatctttgtata

SEQ ID NO: 619 - DNA, 25 bp, artificial sequence
  antisense probe sequence
gacaggctgtaagcatcgctgagaa

SEQ ID NO: 620 - DNA, 25 bp, artificial sequence
  antisense probe sequence
aggacttttgacttttatctggata

SEQ ID NO: 621 - DNA, 25 bp, artificial sequence
  antisense probe sequence
atcatggaaaggcatcagcattgca

SEQ ID NO: 622 - DNA, 25 bp, artificial sequence
  antisense probe sequence
gcatctaggtagaaatcaggccaaa

SEQ ID NO: 623 - DNA, 25 bp, artificial sequence
  antisense probe sequence
caaaattaagctgtggtttccctct

SEQ ID NO: 624 - DNA, 25 bp, artificial sequence
  antisense probe sequence
ggtttccctctgagtagtgggaata

SEQ ID NO: 625 - DNA, 25 bp, artificial sequence
  antisense probe sequence
aagacacttataattttccatacct

SEQ ID NO: 626 - DNA, 25 bp, artificial sequence
  antisense probe sequence
attttccatacctattttcaactga

SEQ ID NO: 627 - DNA, 25 bp, artificial sequence
  antisense probe sequence
gcaacttgtaagatttaactcagtc

SEQ ID NO: 628 - DNA, 25 bp, artificial sequence
  antisense probe sequence
caataacatactggttttactcatc

SEQ ID NO: 629 - DNA, 25 bp, artificial sequence
  antisense probe sequence
tgcctgtagcattccagagctcact

SEQ ID NO: 630 - DNA, 25 bp, artificial sequence
  antisense probe sequence
ctcactctgtctgccaggtatgaga

SEQ ID NO: 631 - DNA, 25 bp, artificial sequence
  antisense probe sequence
agaagaacacgtaagaccgccacca

SEQ ID NO: 632 - DNA, 25 bp, artificial sequence
  antisense probe sequence
ctgcccccagaacttttggatactg

SEQ ID NO: 633 - DNA, 25 bp, artificial sequence
  antisense probe sequence
ggaggcagttgcataggtctccctc

SEQ ID NO: 634 - DNA, 25 bp, artificial sequence
  antisense probe sequence
gcccaagactactctgggcagctcc

SEQ ID NO: 635 - DNA, 25 bp, artificial sequence
  antisense probe sequence
ggaaaggatttctacagtgttctat

SEQ ID NO: 636 - DNA, 25 bp, artificial sequence
  antisense probe sequence
agagagagtgggtttgggaagagtg

SEQ ID NO: 637 - DNA, 25 bp, artificial sequence
  antisense probe sequence
gttggggagaggggaccgatgtgcc

SEQ ID NO: 638 - DNA, 25 bp, artificial sequence
  antisense probe sequence
gaccgatgtgcctcattgtttagtg

SEQ ID NO: 639 - DNA, 25 bp, artificial sequence
  antisense probe sequence
ttctggataaagtttggttgtttgc

SEQ ID NO: 640 - DNA, 25 bp, artificial sequence
  antisense probe sequence
tacctctgtcgacctgtgaaactga

SEQ ID NO: 641 - DNA, 25 bp, artificial sequence
  antisense probe sequence
cctctgtcgacctgtgaaactgaac

SEQ ID NO: 642 - DNA, 25 bp, artificial sequence
  antisense probe sequence
gaaactgaacaaacagcttatctgc

SEQ ID NO: 643 - DNA, 25 bp, artificial sequence
  antisense probe sequence
gcttatctgcccctaatgtgaaatg

SEQ ID NO: 644 - DNA, 25 bp, artificial sequence
  antisense probe sequence
cttatctgcccctaatgtgaaatga

SEQ ID NO: 645 - DNA, 25 bp, artificial sequence
  antisense probe sequence
atctgcccctaatgtgaaatgatgg

SEQ ID NO: 646 - DNA, 25 bp, artificial sequence
  antisense probe sequence
gcccctaatgtgaaatgatgggaca

SEQ ID NO: 647 - DNA, 25 bp, artificial sequence
  antisense probe sequence
aatccagcaggagtttcttagttag

SEQ ID NO: 648 - DNA, 25 bp, artificial sequence
  antisense probe sequence
gtttcttagttaggatccacagcct

SEQ ID NO: 649 - DNA, 25 bp, artificial sequence
  antisense probe sequence
cttagttaggatccacagcctggga

SEQ ID NO: 650 - DNA, 25 bp, artificial sequence
  antisense probe sequence
tctgcatttcttgaaaccattatta

SEQ ID NO: 651 - DNA, 25 bp, artificial sequence
  antisense probe sequence
gatgttgaaacctgtttggcacctt

SEQ ID NO: 652 - DNA, 25 bp, artificial sequence
  antisense probe sequence
gtttggcaccttctggaagctacca

SEQ ID NO: 653 - DNA, 25 bp, artificial sequence
  antisense probe sequence
cataagaattctactggcctattgt

SEQ ID NO: 654 - DNA, 25 bp, artificial sequence
  antisense probe sequence
aaacacaattccaatcctttttctg

SEQ ID NO: 655 - DNA, 25 bp, artificial sequence
  antisense probe sequence
ggatctaagttaaatcttttggcaa

SEQ ID NO: 656 - DNA, 25 bp, artificial sequence
  antisense probe sequence
actcagacatattttgctgttcatg

SEQ ID NO: 657 - DNA, 25 bp, artificial sequence
  antisense probe sequence
cctgttctcatggatttgttttccc

SEQ ID NO: 658 - DNA, 25 bp, artificial sequence
  antisense probe sequence
gatttgttttcccatactgttttct

SEQ ID NO: 659 - DNA, 25 bp, artificial sequence
  antisense probe sequence
catactgttttctctgatctcaatt

SEQ ID NO: 660 - DNA, 25 bp, artificial sequence
  antisense probe sequence
atctcaattacaggttggatctcac

SEQ ID NO: 661 - DNA, 25 bp, artificial sequence
  antisense probe sequence
attttgccactgttgattactatac

SEQ ID NO: 662 - DNA, 25 bp, artificial sequence
  antisense probe sequence
gagacttcattggtgatacactcaa

SEQ ID NO: 663 - DNA, 25 bp, artificial sequence
  antisense probe sequence
gtgatacactcaatttttactgggt

SEQ ID NO: 664 - DNA, 25 bp, artificial sequence
  antisense probe sequence
gctaataatgttggtcactgtctca

SEQ ID NO: 665 - DNA, 25 bp, artificial sequence
  antisense probe sequence
cacaaagcttttgggtaaccagcgt

SEQ ID NO: 666 - DNA, 25 bp, artificial sequence
  antisense probe sequence
gggtaaccagcgttcttaaatgtat

SEQ ID NO: 667 - DNA, 25 bp, artificial sequence
  antisense probe sequence
tatggtttttgaccaggtgaaccct

SEQ ID NO: 668 - DNA, 25 bp, artificial sequence
  antisense probe sequence
gaccaggtgaaccctttagaagtga

SEQ ID NO: 669 - DNA, 25 bp, artificial sequence
  antisense probe sequence
aaatacctttggctgtgatgaatgt

SEQ ID NO: 670 - DNA, 25 bp, artificial sequence
  antisense probe sequence
tgaatgtagatcccagcagaatacc

SEQ ID NO: 671 - DNA, 25 bp, artificial sequence
  antisense probe sequence
ttgactgagtatttgtagatgctta

SEQ ID NO: 672 - DNA, 25 bp, artificial sequence
  antisense probe sequence
aagttctcaggtactgttcaattat

SEQ ID NO: 673 - DNA, 25 bp, artificial sequence
  antisense probe sequence
gaaacacttttagagcacttgagga

SEQ ID NO: 674 - DNA, 25 bp, artificial sequence
  antisense probe sequence
ataggaccccagacagtttatacct

SEQ ID NO: 675 - DNA, 25 bp, artificial sequence
  antisense probe sequence
gtttataccttccatttgctgtttt

SEQ ID NO: 676 - DNA, 25 bp, artificial sequence
  antisense probe sequence
aagtgtgagcctgccaagtcaacaa

SEQ ID NO: 677 - DNA, 25 bp, artificial sequence
  antisense probe sequence
gcctgccaagtcaacaagtatgcct

SEQ ID NO: 678 - DNA, 25 bp, artificial sequence
  antisense probe sequence
caagtatgcctttagcgcacatgta

SEQ ID NO: 679 - DNA, 25 bp, artificial sequence
  antisense probe sequence
cacatgtaaatagcctgcacttcct

SEQ ID NO: 680 - DNA, 25 bp, artificial sequence
  antisense probe sequence
gcacttcctaaatctcgtgtggcct

SEQ ID NO: 681 - DNA, 25 bp, artificial sequence
  antisense probe sequence
attttgccacattctgtaactgttt

SEQ ID NO: 682 - DNA, 25 bp, artificial sequence
  antisense probe sequence
tttcatcttttgtttcgtgtatata

SEQ ID NO: 683 - DNA, 25 bp, artificial sequence
  antisense probe sequence
gtgtatatactgtttgcctttttca

SEQ ID NO: 684 - DNA, 25 bp, artificial sequence
  antisense probe sequence
tgagtcttttgaacacaggtatgaa

SEQ ID NO: 685 - DNA, 25 bp, artificial sequence
  antisense probe sequence
tctaaaccaatgttacccctaccat

SEQ ID NO: 686 - DNA, 25 bp, artificial sequence
  antisense probe sequence
gttacccctaccatacaggtatgtt

SEQ ID NO: 687 - DNA, 25 bp, artificial sequence
  antisense probe sequence
aaccacattaaatattctgtccatt

SEQ ID NO: 688 - DNA, 25 bp, artificial sequence
  antisense probe sequence
tgcagcatgcaaggcaagatgacaa

SEQ ID NO: 689 - DNA, 25 bp, artificial sequence
  antisense probe sequence
aaataattatgacatgctttctgaa

SEQ ID NO: 690 - DNA, 25 bp, artificial sequence
  antisense probe sequence
aagtgtccccagatagtttcataaa

SEQ ID NO: 691 - DNA, 25 bp, artificial sequence
  antisense probe sequence
gaaaaacccatagacatcatgttca

SEQ ID NO: 692 - DNA, 25 bp, artificial sequence
  antisense probe sequence
tgatgacaaggcatgttcataaccc

SEQ ID NO: 693 - DNA, 25 bp, artificial sequence
  antisense probe sequence
cagctaaataactgcaatacttttg

SEQ ID NO: 694 - DNA, 25 bp, artificial sequence
  antisense probe sequence
gagtttggcaggtttcgaagatgtg

SEQ ID NO: 695 - DNA, 25 bp, artificial sequence
  antisense probe sequence
tacatttcacatttaccagcaagtc

SEQ ID NO: 696 - DNA, 25 bp, artificial sequence
  antisense probe sequence
aatagtgcttatttacatagtcaat

SEQ ID NO: 697 - DNA, 25 bp, artificial sequence
  antisense probe sequence
atcttcgatctgcccaatatttaat

SEQ ID NO: 698 - DNA, 25 bp, artificial sequence
  antisense probe sequence
gatatgcctatgtttctttaactat

SEQ ID NO: 699 - DNA, 25 bp, artificial sequence
  antisense probe sequence
tctttaactatacagcctctttaca

SEQ ID NO: 700 - DNA, 25 bp, artificial sequence
  antisense probe sequence
gtattgcaacctgctatttagcctt

SEQ ID NO: 701 - DNA, 25 bp, artificial sequence
  antisense probe sequence
atttagcctttggtgccttagaatt

SEQ ID NO: 702 - DNA, 25 bp, artificial sequence
  antisense probe sequence
tttctctattcactttttattgctc

SEQ ID NO: 703 - DNA, 25 bp, artificial sequence
  antisense probe sequence
attgctcttgctttctattgctact

SEQ ID NO: 704 - DNA, 25 bp, artificial sequence
  antisense probe sequence
gctactaaagcctcttttatccagc

SEQ ID NO: 705 - DNA, 25 bp, artificial sequence
  antisense probe sequence
gtaatagttccaacattgtagcgaa

SEQ ID NO: 706 - DNA, 25 bp, artificial sequence
  antisense probe sequence
gggtctccaggaagatctcccagat

SEQ ID NO: 707 - DNA, 25 bp, artificial sequence
  antisense probe sequence
tgggtattattctttgctcctgcat

SEQ ID NO: 708 - DNA, 25 bp, artificial sequence
  antisense probe sequence
ttttttagcagacctcacttcacag

SEQ ID NO: 709 - DNA, 25 bp, artificial sequence
  antisense probe sequence
tttctcttctgctatctgtggtctg

SEQ ID NO: 710 - DNA, 25 bp, artificial sequence
  antisense probe sequence
aggtctataccagaaactctcgtga

SEQ ID NO: 711 - DNA, 25 bp, artificial sequence
  antisense probe sequence
cattaaagccctcaagtctcttgtc

SEQ ID NO: 712 - DNA, 25 bp, artificial sequence
  antisense probe sequence
ttctgcttctttgtgatatcatcct

SEQ ID NO: 713 - DNA, 25 bp, artificial sequence
  antisense probe sequence
atatcatcctgtgttgccttcatct

SEQ ID NO: 714 - DNA, 25 bp, artificial sequence
  antisense probe sequence
cctactgattctgtggcgcgacaaa

SEQ ID NO: 715 - DNA, 25 bp, artificial sequence
  antisense probe sequence
ggataatggcagcttgtccctctgg

SEQ ID NO: 716 - DNA, 25 bp, artificial sequence
  antisense probe sequence
agctgtgatgaccattctgctctgg

SEQ ID NO: 717 - DNA, 25 bp, artificial sequence
  antisense probe sequence
gtttacctagtattcatcaccctgc

SEQ ID NO: 718 - DNA, 25 bp, artificial sequence
  antisense probe sequence
ttgttttctctgtgttatgtcttgg

SEQ ID NO: 719 - DNA, 25 bp, artificial sequence
  antisense probe sequence
ggaaacccttccatgtcaatgtagg

SEQ ID NO: 720 - DNA, 25 bp, artificial sequence
  antisense probe sequence
gtatcttctttcagctgctatacag

SEQ ID NO: 721 - DNA, 25 bp, artificial sequence
  antisense probe sequence
tgtgattgggccatgtttctttttc

SEQ ID NO: 722 - DNA, 25 bp, artificial sequence
  antisense probe sequence
aagtcccttcttcatatcaaactct

SEQ ID NO: 723 - DNA, 25 bp, artificial sequence
  antisense probe sequence
tatagttgtgggttgctcttgtaaa

SEQ ID NO: 724 - DNA, 25 bp, artificial sequence
  antisense probe sequence
caggctttactgactgtgaaacttc

SEQ ID NO: 725 - DNA, 25 bp, artificial sequence
  antisense probe sequence
tttctactctgcacttgatcttagc

SEQ ID NO: 726 - DNA, 25 bp, artificial sequence
  antisense probe sequence
gagaagcgattctaccctggatagt

SEQ ID NO: 727 - DNA, 25 bp, artificial sequence
  antisense probe sequence
aggtgtttattagccattctgagta

SEQ ID NO: 728 - DNA, 25 bp, artificial sequence
  antisense probe sequence
agattatggcctattgaacaaaatg

SEQ ID NO: 729 - DNA, 25 bp, artificial sequence
  antisense probe sequence
gaaactgggagtccacaaagacata

SEQ ID NO: 730 - DNA, 25 bp, artificial sequence
  antisense probe sequence
gaaagatgaagtacctcctgacaga

SEQ ID NO: 731 - DNA, 25 bp, artificial sequence
  antisense probe sequence
gaagtacctcctgacagagcaagaa

SEQ ID NO: 732 - DNA, 25 bp, artificial sequence
  antisense probe sequence
ggacaatggctattttattcaagac

SEQ ID NO: 733 - DNA, 25 bp, artificial sequence
  antisense probe sequence
gagactaggactcagtctgaactga

SEQ ID NO: 734 - DNA, 25 bp, artificial sequence
  antisense probe sequence
gatcacacaccgtatgtgtttgcta

SEQ ID NO: 735 - DNA, 25 bp, artificial sequence
  antisense probe sequence
tgtttgctaactggctttacccaaa

SEQ ID NO: 736 - DNA, 25 bp, artificial sequence
  antisense probe sequence
ggaaaaaggcactcagggcacacag

SEQ ID NO: 737 - DNA, 25 bp, artificial sequence
  antisense probe sequence
aattctctacaaacctagttgctaa

SEQ ID NO: 738 - DNA, 25 bp, artificial sequence
  antisense probe sequence
ttgctaaaactacctgttgtaacct

SEQ ID NO: 739 - DNA, 25 bp, artificial sequence
  antisense probe sequence
aggctgtgctggacctggcttcatt

SEQ ID NO: 740 - DNA, 25 bp, artificial sequence
  antisense probe sequence
ttcatttctgctccaggatggcagg

SEQ ID NO: 741 - DNA, 25 bp, artificial sequence
  antisense probe sequence
tcttcatggctgcatgaccagcctg

SEQ ID NO: 742 - DNA, 25 bp, artificial sequence
  antisense probe sequence
taggtgtacactgggagccgtgcca

SEQ ID NO: 743 - DNA, 25 bp, artificial sequence
  antisense probe sequence
actgggagccgtgccatgtttcagg

SEQ ID NO: 744 - DNA, 25 bp, artificial sequence
  antisense probe sequence
tgccatgtttcaggccctgtcctgg

SEQ ID NO: 745 - DNA, 25 bp, artificial sequence
  antisense probe sequence
gggtgcgggaccttggtcctccaca

SEQ ID NO: 746 - DNA, 25 bp, artificial sequence
  antisense probe sequence
tgggttgagattcacatgtgctcct

SEQ ID NO: 747 - DNA, 25 bp, artificial sequence
  antisense probe sequence
acatgtgctccttacgaccacgggt

SEQ ID NO: 748 - DNA, 25 bp, artificial sequence
  antisense probe sequence
acccttcgctgtgtgcatattcgtg

SEQ ID NO: 749 - DNA, 25 bp, artificial sequence
  antisense probe sequence
gtgcatattcgtgtgcttatgagtt

SEQ ID NO: 750 - DNA, 25 bp, artificial sequence
  antisense probe sequence
accctctccttgagtttctgtgaat

SEQ ID NO: 751 - DNA, 25 bp, artificial sequence
  antisense probe sequence
ctgatgctgggagccaaatgctggt

SEQ ID NO: 752 - DNA, 25 bp, artificial sequence
  antisense probe sequence
aaatgctggtgctttgagagtcccg

SEQ ID NO: 753 - DNA, 25 bp, artificial sequence
  antisense probe sequence
gtgctttgagagtcccggaggcccc

SEQ ID NO: 754 - DNA, 25 bp, artificial sequence
  antisense probe sequence
cgccccgctggtgtgtatatgtgtg

SEQ ID NO: 755 - DNA, 25 bp, artificial sequence
  antisense probe sequence
ggtcacacacagatgggtaagccca

SEQ ID NO: 756 - DNA, 25 bp, artificial sequence
  antisense probe sequence
gtaagcccactgatctacttgtagt

SEQ ID NO: 757 - DNA, 25 bp, artificial sequence
  antisense probe sequence
gatctacttgtagtcactcagtgta

SEQ ID NO: 758 - DNA, 25 bp, artificial sequence
  antisense probe sequence
agtcactcagtgtaatcattaggct

SEQ ID NO: 759 - DNA, 25 bp, artificial sequence
  antisense probe sequence
atcattaggctatcttcaaggaatc

SEQ ID NO: 760 - DNA, 25 bp, artificial sequence
  antisense probe sequence
tcaaggaatcattgtgcagtcaaaa

SEQ ID NO: 761 - DNA, 25 bp, artificial sequence
  antisense probe sequence
aaacagttgatggtgcactcgtagc

SEQ ID NO: 762 - DNA, 25 bp, artificial sequence
  antisense probe sequence
gatggtgcactcgtagctgcaaaat

SEQ ID NO: 763 - DNA, 25 bp, artificial sequence
  antisense probe sequence
ggctgtgacattgagtggttacaca

SEQ ID NO: 764 - DNA, 25 bp, artificial sequence
  antisense probe sequence
agtggttacacagaagacctgcttc

SEQ ID NO: 765 - DNA, 25 bp, artificial sequence
  antisense probe sequence
gaaacattactattcagttgctatt

SEQ ID NO: 766 - DNA, 25 bp, artificial sequence
  antisense probe sequence
ttttagttgctgctcacttatggcc

SEQ ID NO: 767 - DNA, 25 bp, artificial sequence
  antisense probe sequence
ttgctgctcacttatggccacagaa

SEQ ID NO: 768 - DNA, 25 bp, artificial sequence
  antisense probe sequence
tggccacagaacagtccctttttga

SEQ ID NO: 769 - DNA, 25 bp, artificial sequence
  antisense probe sequence
agtccctttttgagtaaagcagcaa

SEQ ID NO: 770 - DNA, 25 bp, artificial sequence
  antisense probe sequence
aatgaactcattacagcagctaatc

SEQ ID NO: 771 - DNA, 25 bp, artificial sequence
  antisense probe sequence
agcagctaatcaatgcaaactttgt

SEQ ID NO: 772 - DNA, 25 bp, artificial sequence
  antisense probe sequence
atctccctcagtgcctggcaatgtt

SEQ ID NO: 773 - DNA, 25 bp, artificial sequence
  antisense probe sequence
tcagtgcctggcaatgtttgtggtt

SEQ ID NO: 774 - DNA, 25 bp, artificial sequence
  antisense probe sequence
tgcctggcaatgtttgtggttggtt

SEQ ID NO: 775 - DNA, 25 bp, artificial sequence
  antisense probe sequence
tttgtggttggttgagtgagttaac

SEQ ID NO: 776 - DNA, 25 bp, artificial sequence
  antisense probe sequence
gtgagttaacaggagaccatctttt

SEQ ID NO: 777 - DNA, 25 bp, artificial sequence
  antisense probe sequence
acaggagaccatcttttggcctttt

SEQ ID NO: 778 - DNA, 25 bp, artificial sequence
  antisense probe sequence
tttctacctctgttttctcttacta

SEQ ID NO: 779 - DNA, 25 bp, artificial sequence
  antisense probe sequence
gttttctcttactatacttgcctac

SEQ ID NO: 780 - DNA, 25 bp, artificial sequence
  antisense probe sequence
ttctcttactatacttgcctacatc

SEQ ID NO: 781 - DNA, 25 bp, artificial sequence
  antisense probe sequence
cttactatacttgcctacatctcat

SEQ ID NO: 782 - DNA, 25 bp, artificial sequence
  antisense probe sequence
tatacttgcctacatctcatcttct

SEQ ID NO: 783 - DNA, 25 bp, artificial sequence
  antisense probe sequence
atgttcactgtatgtgccaagccta

SEQ ID NO: 784 - DNA, 25 bp, artificial sequence
  antisense probe sequence
actgtatgtgccaagcctaatatga

SEQ ID NO: 785 - DNA, 25 bp, artificial sequence
  antisense probe sequence
gtgccaagcctaatatgagagctat

SEQ ID NO: 786 - DNA, 25 bp, artificial sequence
  antisense probe sequence
ttatagagtttatgctacagcccta

SEQ ID NO: 787 - DNA, 25 bp, artificial sequence
  antisense probe sequence
agagtttatgctacagccctacctt

SEQ ID NO: 788 - DNA, 25 bp, artificial sequence
  antisense probe sequence
acagccctaccttcaggaaacttat

SEQ ID NO: 789 - DNA, 25 bp, artificial sequence
  antisense probe sequence
aggaaacttatctactggacaaaca

SEQ ID NO: 790 - DNA, 25 bp, artificial sequence
  antisense probe sequence
acattgtaattatctagcataggca

SEQ ID NO: 791 - DNA, 25 bp, artificial sequence
  antisense probe sequence
gcataggcaaatatagacagtaaca

SEQ ID NO: 792 - DNA, 25 bp, artificial sequence
  antisense probe sequence
aacagacaggtttacaattattaag

SEQ ID NO: 793 - DNA, 25 bp, artificial sequence
  antisense probe sequence
caattattaagaaagggcagccagg

SEQ ID NO: 794 - DNA, 25 bp, artificial sequence
  antisense probe sequence
gatgactatctatgaacctaaggag

SEQ ID NO: 795 - DNA, 25 bp, artificial sequence
  antisense probe sequence
taatttcttttgagggtttgcataa

SEQ ID NO: 796 - DNA, 25 bp, artificial sequence
  antisense probe sequence
aatttctggaattttcaatgagcaa

SEQ ID NO: 797 - DNA, 25 bp, artificial sequence
  antisense probe sequence
taaaataggcacatatctgaagata

SEQ ID NO: 798 - DNA, 25 bp, artificial sequence
  antisense probe sequence
ctgaagataaaagccgaattgaccc

SEQ ID NO: 799 - DNA, 25 bp, artificial sequence
  antisense probe sequence
attaatggctttgaatggctatgaa

SEQ ID NO: 800 - DNA, 25 bp, artificial sequence
  antisense probe sequence
aaaaataatatctctgccctcttca

SEQ ID NO: 801 - DNA, 25 bp, artificial sequence
  antisense probe sequence
cctcttcactactcccatgtaaaat

SEQ ID NO: 802 - DNA, 25 bp, artificial sequence
  antisense probe sequence
gtagattttaccaacgtttcaagag

SEQ ID NO: 803 - DNA, 25 bp, artificial sequence
  antisense probe sequence
gtttcaagagagacatgattcccaa

SEQ ID NO: 804 - DNA, 25 bp, artificial sequence
  antisense probe sequence
gacatgattcccaaatattatgtaa

SEQ ID NO: 805 - DNA, 25 bp, artificial sequence
  antisense probe sequence
taccatagcaagttcttatcctttg

SEQ ID NO: 806 - DNA, 25 bp, artificial sequence
  antisense probe sequence
acctgtcacagtaatatgccaattt

SEQ ID NO: 807 - DNA, 25 bp, artificial sequence
  antisense probe sequence
gccaatttttggtgtcgctttagta

SEQ ID NO: 808 - DNA, 25 bp, artificial sequence
  antisense probe sequence
gtctttcctcagttgtctcctaaaa

SEQ ID NO: 809 - DNA, 25 bp, artificial sequence
  antisense probe sequence
gatcgtcttgtgcagccctttaaaa

SEQ ID NO: 810 - DNA, 25 bp, artificial sequence
  antisense probe sequence
atgcgttttgcattcatgtctttgc

SEQ ID NO: 811 - DNA, 25 bp, artificial sequence
  antisense probe sequence
ctttcattttgggagtgactgtcat

SEQ ID NO: 812 - DNA, 25 bp, artificial sequence
  antisense probe sequence
acaccagggccagattgcgtgggtt

SEQ ID NO: 813 - DNA, 25 bp, artificial sequence
  antisense probe sequence
tgcgtgggttctagctagggaccta

SEQ ID NO: 814 - DNA, 25 bp, artificial sequence
  antisense probe sequence
agctggttacttgatttctctctgt

SEQ ID NO: 815 - DNA, 25 bp, artificial sequence
  antisense probe sequence
ttctctctgttccatttactatctg

SEQ ID NO: 816 - DNA, 25 bp, artificial sequence
  antisense probe sequence
gtagagttctctaaagggtcttgat

SEQ ID NO: 817 - DNA, 25 bp, artificial sequence
  antisense probe sequence
aagggtcttgatattagtgggacat

SEQ ID NO: 818 - DNA, 25 bp, artificial sequence
  antisense probe sequence
agtgggacataattagttctaaact

SEQ ID NO: 819 - DNA, 25 bp, artificial sequence
  antisense probe sequence
agtcacttaactatagtccagaaaa

SEQ ID NO: 820 - DNA, 25 bp, artificial sequence
  antisense probe sequence
ggtaaaattcacaaagtctgccaca

SEQ ID NO: 821 - DNA, 25 bp, artificial sequence
  antisense probe sequence
agtctgccacaaagtctggcatcca

SEQ ID NO: 822 - DNA, 25 bp, artificial sequence
  antisense probe sequence
aagtctggcatccagttgagaacta

SEQ ID NO: 823 - DNA, 25 bp, artificial sequence
  antisense probe sequence
agttgagaactaccagacatacaaa

SEQ ID NO: 824 - DNA, 25 bp, artificial sequence
  antisense probe sequence
agaaaaatcaatcataaccacccag

SEQ ID NO: 825 - DNA, 25 bp, artificial sequence
  antisense probe sequence
tcataaccacccagaactaacacag

SEQ ID NO: 826 - DNA, 25 bp, artificial sequence
  antisense probe sequence
tacactggatagaattaatggcaag

SEQ ID NO: 827 - DNA, 25 bp, artificial sequence
  antisense probe sequence
agattaacattgacagttcgacaag

SEQ ID NO: 828 - DNA, 25 bp, artificial sequence
  antisense probe sequence
gttcgacaagagagactatcatcag

SEQ ID NO: 829 - DNA, 25 bp, artificial sequence
  antisense probe sequence
tggaaagggattcctaccccagatt

SEQ ID NO: 830 - DNA, 25 bp, artificial sequence
  antisense probe sequence
gattcctaccccagatttctaaagt

SEQ ID NO: 831 - DNA, 25 bp, artificial sequence
  antisense probe sequence
gtcagaaatgtaccaaaaacttttg

SEQ ID NO: 832 - DNA, 25 bp, artificial sequence
  antisense probe sequence
acttttgaaaactatgcagtccaac

SEQ ID NO: 833 - DNA, 25 bp, artificial sequence
  antisense probe sequence
actatgcagtccaacaacagtttct

SEQ ID NO: 834 - DNA, 25 bp, artificial sequence
  antisense probe sequence
gtttctgactacaactcaaaagttt

SEQ ID NO: 835 - DNA, 25 bp, artificial sequence
  antisense probe sequence
tgatctttttatttagaaacccaca

SEQ ID NO: 836 - DNA, 25 bp, artificial sequence
  antisense probe sequence
gaaacccacaaaatcagaaacacag

SEQ ID NO: 837 - DNA, 25 bp, artificial sequence
  antisense probe sequence
gtacagcaagcctatgtagttcaat

SEQ ID NO: 838 - DNA, 25 bp, artificial sequence
  antisense probe sequence
acagcctatggaggctccagtcatg

SEQ ID NO: 839 - DNA, 25 bp, artificial sequence
  antisense probe sequence
ggctccagtcatgctgtgggatgag

SEQ ID NO: 840 - DNA, 25 bp, artificial sequence
  antisense probe sequence
ctgtgggatgagtccagcttccctg

SEQ ID NO: 841 - DNA, 25 bp, artificial sequence
  antisense probe sequence
ttccctgacatcccaggggctgtaa

SEQ ID NO: 842 - DNA, 25 bp, artificial sequence
  antisense probe sequence
ggggctgtaagtgccaacatgactg

SEQ ID NO: 843 - DNA, 25 bp, artificial sequence
  antisense probe sequence
agcggagtaaggagcgctccctact

SEQ ID NO: 844 - DNA, 25 bp, artificial sequence
  antisense probe sequence
tccctactgcatggggacttccacg

SEQ ID NO: 845 - DNA, 25 bp, artificial sequence
  antisense probe sequence
actgggaccagaatgagcgttttct

SEQ ID NO: 846 - DNA, 25 bp, artificial sequence
  antisense probe sequence
gagcgttttctggtagtgcttaact

SEQ ID NO: 847 - DNA, 25 bp, artificial sequence
  antisense probe sequence
taactttggggatgtgggcctctcg

SEQ ID NO: 848 - DNA, 25 bp, artificial sequence
  antisense probe sequence
aactggagcctcacgaagggctgct

SEQ ID NO: 849 - DNA, 25 bp, artificial sequence
  antisense probe sequence
gcaaaggggtttcctcgatttggag

SEQ ID NO: 850 - DNA, 25 bp, artificial sequence
  antisense probe sequence
ttccaccgtcatttctaactcttaa

SEQ ID NO: 851 - DNA, 25 bp, artificial sequence
  antisense probe sequence
aaaccaactcagttccatcatggtg

SEQ ID NO: 852 - DNA, 25 bp, artificial sequence
  antisense probe sequence
tgaggtggtctttaacgaccctgaa

SEQ ID NO: 853 - DNA, 25 bp, artificial sequence
  antisense probe sequence
gaagttactcgtgtcaaagccgtta

SEQ ID NO: 854 - DNA, 25 bp, artificial sequence
  antisense probe sequence
gatcctggcttgcggagtggctaaa

SEQ ID NO: 855 - DNA, 25 bp, artificial sequence
  antisense probe sequence
tggatgcagggatcccagcagtgca

SEQ ID NO: 856 - DNA, 25 bp, artificial sequence
  antisense probe sequence
cggagtacctgcgctatgaagacac

SEQ ID NO: 857 - DNA, 25 bp, artificial sequence
  antisense probe sequence
tacaagttcggctttgagcttcctc

SEQ ID NO: 858 - DNA, 25 bp, artificial sequence
  antisense probe sequence
ccgagccagccaactcaagagacaa

SEQ ID NO: 859 - DNA, 25 bp, artificial sequence
  antisense probe sequence
ggtggatgtcaatacccctgattta

SEQ ID NO: 860 - DNA, 25 bp, artificial sequence
  antisense probe sequence
gtgttctcctactgcaaatattttc

SEQ ID NO: 861 - DNA, 25 bp, artificial sequence
  antisense probe sequence
ggttttctcttcatgtaagtccttg

SEQ ID NO: 862 - DNA, 25 bp, artificial sequence
  antisense probe sequence
tgttcttagcactttaattcctgtc

SEQ ID NO: 863 - DNA, 25 bp, artificial sequence
  antisense probe sequence
gctgaaactggtctactgtgtctct

SEQ ID NO: 864 - DNA, 25 bp, artificial sequence
  antisense probe sequence
gaaagggttgctgctgtcagccttg

SEQ ID NO: 865 - DNA, 25 bp, artificial sequence
  antisense probe sequence
caaccctgtgatcagaacctccaaa

SEQ ID NO: 866 - DNA, 25 bp, artificial sequence
  antisense probe sequence
agatagggatattggcccctcactg

SEQ ID NO: 867 - DNA, 25 bp, artificial sequence
  antisense probe sequence
cactctcagccatagcactttgttc

SEQ ID NO: 868 - DNA, 25 bp, artificial sequence
  antisense probe sequence
actttgttcactgtcctgtgtcaga

SEQ ID NO: 869 - DNA, 25 bp, artificial sequence
  antisense probe sequence
tgtgtcagagcactgagctccaccc

SEQ ID NO: 870 - DNA, 25 bp, artificial sequence
  antisense probe sequence
agctccacccttttctgagagttat

SEQ ID NO: 871 - DNA, 25 bp, artificial sequence
  antisense probe sequence
atcaggactctgacgtctctttggt

SEQ ID NO: 872 - DNA, 25 bp, artificial sequence
  antisense probe sequence
gttgatttacctctgggcatatccc

SEQ ID NO: 873 - DNA, 25 bp, artificial sequence
  antisense probe sequence
tcacaggtgggatcggcactcaggg

SEQ ID NO: 874 - DNA, 25 bp, artificial sequence
  antisense probe sequence
ccttgggctcctgatgaccagaaag

SEQ ID NO: 875 - DNA, 25 bp, artificial sequence
  antisense probe sequence
gggccaccggggtctaatggtgaca

SEQ ID NO: 876 - DNA, 25 bp, artificial sequence
  antisense probe sequence
aatggtgacagtccaaaccactcca

SEQ ID NO: 877 - DNA, 25 bp, artificial sequence
  antisense probe sequence
gcctcctggcagaagccgagtgtgc

SEQ ID NO: 878 - DNA, 25 bp, artificial sequence
  antisense probe sequence
tgctggggtctccgaagagggtccc

SEQ ID NO: 879 - DNA, 25 bp, artificial sequence
  antisense probe sequence
cctccaaaggtctgatgtctccact

SEQ ID NO: 880 - DNA, 25 bp, artificial sequence
  antisense probe sequence
gccttaccgctctgtttatagtgac

SEQ ID NO: 881 - DNA, 25 bp, artificial sequence
  antisense probe sequence
tttatagtgacccaccctagatctt

SEQ ID NO: 882 - DNA, 25 bp, artificial sequence
  antisense probe sequence
cctaccaggccaccattgatggagt

SEQ ID NO: 883 - DNA, 25 bp, artificial sequence
  antisense probe sequence
gagtcagatttttggggacatcagg

SEQ ID NO: 884 - DNA, 25 bp, artificial sequence
  antisense probe sequence
gggacatcaggacagaacgtgagtg

SEQ ID NO: 885 - DNA, 25 bp, artificial sequence
  antisense probe sequence
gtgacattttccgatacagcagcat

SEQ ID NO: 886 - DNA, 25 bp, artificial sequence
  antisense probe sequence
ttccgatacagcagcatggaggatc

SEQ ID NO: 887 - DNA, 25 bp, artificial sequence
  antisense probe sequence
atcctggagtggaccctgcgggtcc

SEQ ID NO: 888 - DNA, 25 bp, artificial sequence
  antisense probe sequence
ctacaaaactgacccgttcatcttc

SEQ ID NO: 889 - DNA, 25 bp, artificial sequence
  antisense probe sequence
ggctccaaaatcatccgaggtcctg

SEQ ID NO: 890 - DNA, 25 bp, artificial sequence
  antisense probe sequence
gaccagacagtgctgttggtgactg

SEQ ID NO: 891 - DNA, 25 bp, artificial sequence
  antisense probe sequence
gcttcggggcagaggacgatgacct

SEQ ID NO: 892 - DNA, 25 bp, artificial sequence
  antisense probe sequence
ggcagaggacgatgacctgggaggc

SEQ ID NO: 893 - DNA, 25 bp, artificial sequence
  antisense probe sequence
acatcgtccacttccagtatgaggt

SEQ ID NO: 894 - DNA, 25 bp, artificial sequence
  antisense probe sequence
gaaggtctcttcttgggatgcagtc

SEQ ID NO: 895 - DNA, 25 bp, artificial sequence
  antisense probe sequence
gtgaactatgtcttcatctgcttca

SEQ ID NO: 896 - DNA, 25 bp, artificial sequence
  antisense probe sequence
agggccgagaagacagagctccact

SEQ ID NO: 897 - DNA, 25 bp, artificial sequence
  antisense probe sequence
gggctttgagattgtacgtccaggc

SEQ ID NO: 898 - DNA, 25 bp, artificial sequence
  antisense probe sequence
ccctctcggccagatgtgatgttca

SEQ ID NO: 899 - DNA, 25 bp, artificial sequence
  antisense probe sequence
tgttcatggtttatcccctggacca

SEQ ID NO: 900 - DNA, 25 bp, artificial sequence
  antisense probe sequence
atcccctggaccagaacttgtccga

SEQ ID NO: 901 - DNA, 25 bp, artificial sequence
  antisense probe sequence
gatgctttacccaagagccacagtg

SEQ ID NO: 902 - DNA, 25 bp, artificial sequence
  antisense probe sequence
ggctcctcgctgtctagggaaggac

SEQ ID NO: 903 - DNA, 25 bp, artificial sequence
  antisense probe sequence
tgagggttgcctattgtgttctcgg

SEQ ID NO: 904 - DNA, 25 bp, artificial sequence
  antisense probe sequence
tgtcctgcccaagtgggctgcagac

SEQ ID NO: 905 - DNA, 25 bp, artificial sequence
  antisense probe sequence
ctgcagactgagtgctgcccttgta

SEQ ID NO: 906 - DNA, 25 bp, artificial sequence
  antisense probe sequence
cccaactcactgcagttcatctgaa

SEQ ID NO: 907 - DNA, 25 bp, artificial sequence
  antisense probe sequence
ttcatctgaacaacctgagctcctg

SEQ ID NO: 908 - DNA, 25 bp, artificial sequence
  antisense probe sequence
acctaaggccctgatccaaagcagc

SEQ ID NO: 909 - DNA, 25 bp, artificial sequence
  antisense probe sequence
gcctgttgagctggttctccagggc

SEQ ID NO: 910 - DNA, 25 bp, artificial sequence
  antisense probe sequence
cttgcacagtctcctatgtctgagc

SEQ ID NO: 911 - DNA, 25 bp, artificial sequence
  antisense probe sequence
gagccctgacccttgaatggttgtc

SEQ ID NO: 912 - DNA, 25 bp, artificial sequence
  antisense probe sequence
tgaatggttgtccttgactctgtgc

SEQ ID NO: 913 - DNA, 25 bp, artificial sequence
  antisense probe sequence
gagcccagtgattgtggctgctcct

SEQ ID NO: 914 - DNA, 25 bp, artificial sequence
  antisense probe sequence
ctccgggcttcatagttctttgtaa

SEQ ID NO: 915 - DNA, 25 bp, artificial sequence
  antisense probe sequence
gacaggtgaacatttccgcctggtc

SEQ ID NO: 916 - DNA, 25 bp, artificial sequence
  antisense probe sequence
tatgacaccaagggccgttttgctg

SEQ ID NO: 917 - DNA, 25 bp, artificial sequence
  antisense probe sequence
tgctgttcaccgcatcacagtggaa

SEQ ID NO: 918 - DNA, 25 bp, artificial sequence
  antisense probe sequence
gtgactcatgatgctcgaaccatcc

SEQ ID NO: 919 - DNA, 25 bp, artificial sequence
  antisense probe sequence
ccagatcctgtcatcaaggtgaacg

SEQ ID NO: 920 - DNA, 25 bp, artificial sequence
  antisense probe sequence
ggtgattggtggagccaacctcggt

SEQ ID NO: 921 - DNA, 25 bp, artificial sequence
  antisense probe sequence
acctcggtcgtgttggtgtgatcac

SEQ ID NO: 922 - DNA, 25 bp, artificial sequence
  antisense probe sequence
gacatcctggttcttttgatgtggt

SEQ ID NO: 923 - DNA, 25 bp, artificial sequence
  antisense probe sequence
ttggatttccctgcccaggggaaag

SEQ ID NO: 924 - DNA, 25 bp, artificial sequence
  antisense probe sequence
gggcattcgacttactgttgctgaa

SEQ ID NO: 925 - DNA, 25 bp, artificial sequence
  antisense probe sequence
gagataagaggctggccaccaaaca

SEQ ID NO: 926 - DNA, 25 bp, artificial sequence
  antisense probe sequence
aaactgtagtttgcctccaagacac

SEQ ID NO: 927 - DNA, 25 bp, artificial sequence
  antisense probe sequence
cctttaatcttctcttttgtataca

SEQ ID NO: 928 - DNA, 25 bp, artificial sequence
  antisense probe sequence
ttacccatggtgttctttgttcctt

SEQ ID NO: 929 - DNA, 25 bp, artificial sequence
  antisense probe sequence
gttccttttcataagctaataccac

SEQ ID NO: 930 - DNA, 25 bp, artificial sequence
  antisense probe sequence
gaacgcatattgacagcacgcttta

SEQ ID NO: 931 - DNA, 25 bp, artificial sequence
  antisense probe sequence
gcacgctttacttagtagccggttc

SEQ ID NO: 932 - DNA, 25 bp, artificial sequence
  antisense probe sequence
cggttcccatttgccatacaatgta

SEQ ID NO: 933 - DNA, 25 bp, artificial sequence
  antisense probe sequence
cagaagaaagagcaacccaccaaac

SEQ ID NO: 934 - DNA, 25 bp, artificial sequence
  antisense probe sequence
ccccgaacactttcatactaagact

SEQ ID NO: 935 - DNA, 25 bp, artificial sequence
  antisense probe sequence
gtagatctcagttctgcgtttattg

SEQ ID NO: 936 - DNA, 25 bp, artificial sequence
  antisense probe sequence
aaaactgtttgcatctttgtatgta

SEQ ID NO: 937 - DNA, 25 bp, artificial sequence
  antisense probe sequence
acagattgttctcaagagggccatc

SEQ ID NO: 938 - DNA, 25 bp, artificial sequence
  antisense probe sequence
gcaccaacaactcaacatggtcatc

SEQ ID NO: 939 - DNA, 25 bp, artificial sequence
  antisense probe sequence
tggtttttccagctagcagtactcc

SEQ ID NO: 940 - DNA, 25 bp, artificial sequence
  antisense probe sequence
ctgtgactgggcagtgcttttctct

SEQ ID NO: 941 - DNA, 25 bp, artificial sequence
  antisense probe sequence
tcccatgtctagcctccaaaagtta

SEQ ID NO: 942 - DNA, 25 bp, artificial sequence
  antisense probe sequence
gaaaattagtcaactgcacgtggaa

SEQ ID NO: 943 - DNA, 25 bp, artificial sequence
  antisense probe sequence
ccactttggggatctctttatttct

SEQ ID NO: 944 - DNA, 25 bp, artificial sequence
  antisense probe sequence
gagagaagggttgagtgtggcatac

SEQ ID NO: 945 - DNA, 25 bp, artificial sequence
  antisense probe sequence
agtgtggcatactttctgaaacctg

SEQ ID NO: 946 - DNA, 25 bp, artificial sequence
  antisense probe sequence
gaaacctggagctgggaattgcgga

SEQ ID NO: 947 - DNA, 25 bp, artificial sequence
  antisense probe sequence
ggtctagactagttacatcacatag

SEQ ID NO: 948 - DNA, 25 bp, artificial sequence
  antisense probe sequence
agggctcatcgacatcgagaacccc

SEQ ID NO: 949 - DNA, 25 bp, artificial sequence
  antisense probe sequence
ggtcacacaactggatctggacggg

SEQ ID NO: 950 - DNA, 25 bp, artificial sequence
  antisense probe sequence
ggacgggccaaaggagctttcgagg

SEQ ID NO: 951 - DNA, 25 bp, artificial sequence
  antisense probe sequence
atgcacttggccgggaagacagagc

SEQ ID NO: 952 - DNA, 25 bp, artificial sequence
  antisense probe sequence
ggctggccatcatccggaaacagcg

SEQ ID NO: 953 - DNA, 25 bp, artificial sequence
  antisense probe sequence
gaggaggctgcccggaagaaggaag

SEQ ID NO: 954 - DNA, 25 bp, artificial sequence
  antisense probe sequence
aaagacgatgccacattgtcaggaa

SEQ ID NO: 955 - DNA, 25 bp, artificial sequence
  antisense probe sequence
ggaaaacgaatgcagtcactctccc

SEQ ID NO: 956 - DNA, 25 bp, artificial sequence
  antisense probe sequence
gcagtcactctccctgaataagtaa

SEQ ID NO: 957 - DNA, 25 bp, artificial sequence
  antisense probe sequence
taagtaactgcgacccgtgggagga

SEQ ID NO: 958 - DNA, 25 bp, artificial sequence
  antisense probe sequence
ggggtagctgctatctttgagacag

SEQ ID NO: 959 - DNA, 25 bp, artificial sequence
  antisense probe sequence
ctggtcacagtggtagtcgctggcc

SEQ ID NO: 960 - DNA, 25 bp, artificial sequence
  antisense probe sequence
ccctcctgattttggctaggcatcg

SEQ ID NO: 961 - DNA, 25 bp, artificial sequence
  antisense probe sequence
ctaggcatcgtggaaccagctccag

SEQ ID NO: 962 - DNA, 25 bp, artificial sequence
  antisense probe sequence
gtgcaggttgtgcggaagaggctga

SEQ ID NO: 963 - DNA, 25 bp, artificial sequence
  antisense probe sequence
cccaccgctgtgcatcgaatgaggg

SEQ ID NO: 964 - DNA, 25 bp, artificial sequence
  antisense probe sequence
atggacccttcacaagtgtttctcc

SEQ ID NO: 965 - DNA, 25 bp, artificial sequence
  antisense probe sequence
cttccttctcctgaaatccagagac

SEQ ID NO: 966 - DNA, 25 bp, artificial sequence
  antisense probe sequence
aatccagagactttcttgctcatcc

SEQ ID NO: 967 - DNA, 25 bp, artificial sequence
  antisense probe sequence
gaaagcagacttgcatatccctgat

SEQ ID NO: 968 - DNA, 25 bp, artificial sequence
  antisense probe sequence
tatccctgatgagcagctcggctac

SEQ ID NO: 969 - DNA, 25 bp, artificial sequence
  antisense probe sequence
gcagctcggctacttttgtaaactt

SEQ ID NO: 970 - DNA, 25 bp, artificial sequence
  antisense probe sequence
tcaattgacttctgttccttgcttt

SEQ ID NO: 971 - DNA, 25 bp, artificial sequence
  antisense probe sequence
aagacctgcagtgcacggtttcttc

SEQ ID NO: 972 - DNA, 25 bp, artificial sequence
  antisense probe sequence
cggtttcttccaggctgaggtacct

SEQ ID NO: 973 - DNA, 25 bp, artificial sequence
  antisense probe sequence
gaggtacctggatcttgggttcttc

SEQ ID NO: 974 - DNA, 25 bp, artificial sequence
  antisense probe sequence
tgggttcttcactgcagggacccag

SEQ ID NO: 975 - DNA, 25 bp, artificial sequence
  antisense probe sequence
aagtggatctgcttgccagagtcct

SEQ ID NO: 976 - DNA, 25 bp, artificial sequence
  antisense probe sequence
tgtttccaagtcagctttcctgcaa

SEQ ID NO: 977 - DNA, 25 bp, artificial sequence
  antisense probe sequence
gtgcccagatgtgcgctattagatg

SEQ ID NO: 978 - DNA, 25 bp, artificial sequence
  antisense probe sequence
gatgtttctctgataatgtccccaa

SEQ ID NO: 979 - DNA, 25 bp, artificial sequence
  antisense probe sequence
ttgcccctcagctttgcaaagagcc

SEQ ID NO: 980 - DNA, 25 bp, artificial sequence
  antisense probe sequence
ccagctgaccgcatgggtgtgagcc

SEQ ID NO: 981 - DNA, 25 bp, artificial sequence
  antisense probe sequence
aagcgtaaagaggatgtgtggcatt

SEQ ID NO: 982 - DNA, 25 bp, artificial sequence
  antisense probe sequence
gtgtggcattttcacttttggcttg

SEQ ID NO: 983 - DNA, 25 bp, artificial sequence
  antisense probe sequence
ggcattttcacttttggcttgtaaa

SEQ ID NO: 984 - DNA, 25 bp, artificial sequence
  antisense probe sequence
aagcattgtaacttatgaaccttta

SEQ ID NO: 985 - DNA, 25 bp, artificial sequence
  antisense probe sequence
acttatgaacctttacatccagata

SEQ ID NO: 986 - DNA, 25 bp, artificial sequence
  antisense probe sequence
catccagataggttaccagtaacgg

SEQ ID NO: 987 - DNA, 25 bp, artificial sequence
  antisense probe sequence
tatccagtactcctggttcctaggt

SEQ ID NO: 988 - DNA, 25 bp, artificial sequence
  antisense probe sequence
gtactcctggttcctaggtgagcag

SEQ ID NO: 989 - DNA, 25 bp, artificial sequence
  antisense probe sequence
taggtgagcaggtgatgccccaggg

SEQ ID NO: 990 - DNA, 25 bp, artificial sequence
  antisense probe sequence
tttctctgccttggtatagcatatg

SEQ ID NO: 991 - DNA, 25 bp, artificial sequence
  antisense probe sequence
gtaagtttatgcatacagtaatttt

SEQ ID NO: 992 - DNA, 25 bp, artificial sequence
  antisense probe sequence
ggcagctggaatttaaggagggaca

SEQ ID NO: 993 - DNA, 25 bp, artificial sequence
  antisense probe sequence
aagtgcaaagttattccccatcttc

SEQ ID NO: 994 - DNA, 25 bp, artificial sequence
  antisense probe sequence
ccatcttccaagggttgaattctgg

SEQ ID NO: 995 - DNA, 25 bp, artificial sequence
  antisense probe sequence
gaagaagacacattcctagttcccc

SEQ ID NO: 996 - DNA, 25 bp, artificial sequence
  antisense probe sequence
cccgtgaacttcctttgacttattg

SEQ ID NO: 997 - DNA, 25 bp, artificial sequence
  antisense probe sequence
ttgacttattgtccccactaaaaca

SEQ ID NO: 998 - DNA, 25 bp, artificial sequence
  antisense probe sequence
tttcttgcagtttttttatggcatt

SEQ ID NO: 999 - DNA, 25 bp, artificial sequence
  antisense probe sequence
aaagatgccctaagtgttgaagaag

SEQ ID NO: 1000 - DNA, 25 bp, artificial sequence
  antisense probe sequence
aaagcaccaaattcatgtacagcat

SEQ ID NO: 1001 - DNA, 25 bp, artificial sequence
  antisense probe sequence
catgtacagcatgcatcacggatca

SEQ ID NO: 1002 - DNA, 25 bp, artificial sequence
  antisense probe sequence
gcatcacggatcaatagactgtact

SEQ ID NO: 1003 - DNA, 25 bp, artificial sequence
  antisense probe sequence
gcccctggagtcgcggagaaagggc

SEQ ID NO: 1004 - DNA, 25 bp, artificial sequence
  antisense probe sequence
aacgcactggtgaccagactgtccc

SEQ ID NO: 1005 - DNA, 25 bp, artificial sequence
  antisense probe sequence
ccacgccgggaaccaagcaggagac

SEQ ID NO: 1006 - DNA, 25 bp, artificial sequence
  antisense probe sequence
gagagaggagccagacagaccctga

SEQ ID NO: 1007 - DNA, 25 bp, artificial sequence
  antisense probe sequence
gccgggcacattgggggtcaccggc

SEQ ID NO: 1008 - DNA, 25 bp, artificial sequence
  antisense probe sequence
ccgatggagacaccaaccgacaggc

SEQ ID NO: 1009 - DNA, 25 bp, artificial sequence
  antisense probe sequence
gcagctgcgcgggcttatttattaa

SEQ ID NO: 1010 - DNA, 25 bp, artificial sequence
  antisense probe sequence
gataacccttgaatgtagcagcccc

SEQ ID NO: 1011 - DNA, 25 bp, artificial sequence
  antisense probe sequence
cacaggtcgggcgcaggattcagcc

SEQ ID NO: 1012 - DNA, 25 bp, artificial sequence
  antisense probe sequence
aggattcagccggagggaagggacg

SEQ ID NO: 1013 - DNA, 25 bp, artificial sequence
  antisense probe sequence
ccacctccttgggtagtgagcagtg

SEQ ID NO: 1014 - DNA, 25 bp, artificial sequence
  antisense probe sequence
attaccgactgtatgcctacacgga

SEQ ID NO: 1015 - DNA, 25 bp, artificial sequence
  antisense probe sequence
tacacggagtcggagctgcagattg

SEQ ID NO: 1016 - DNA, 25 bp, artificial sequence
  antisense probe sequence
ttccccaacatggtggtggcgcagg

SEQ ID NO: 1017 - DNA, 25 bp, artificial sequence
  antisense probe sequence
gcagcaggcaatcgccagtggcatc

SEQ ID NO: 1018 - DNA, 25 bp, artificial sequence
  antisense probe sequence
cagcccagcagataatccatttcct

SEQ ID NO: 1019 - DNA, 25 bp, artificial sequence
  antisense probe sequence
cagactccggttcactgagggtgtc

SEQ ID NO: 1020 - DNA, 25 bp, artificial sequence
  antisense probe sequence
gagggtgtcctgtataaccagttcc

SEQ ID NO: 1021 - DNA, 25 bp, artificial sequence
  antisense probe sequence
aaccagttcctgtcgcaagtggact

SEQ ID NO: 1022 - DNA, 25 bp, artificial sequence
  antisense probe sequence
ttcgagaactcggccaagcggctca

SEQ ID NO: 1023 - DNA, 25 bp, artificial sequence
  antisense probe sequence
ggcacagcgacgtcaagcgcttttg

SEQ ID NO: 1024 - DNA, 25 bp, artificial sequence
  antisense probe sequence
gctcctgagagcgcgggacttggac

SEQ ID NO: 1025 - DNA, 25 bp, artificial sequence
  antisense probe sequence
cacttagtgtgaaagacttgccttg

SEQ ID NO: 1026 - DNA, 25 bp, artificial sequence
  antisense probe sequence
gacttgccttgtgtattctttatgt

SEQ ID NO: 1027 - DNA, 25 bp, artificial sequence
  antisense probe sequence
cactgtcaattttatgggaagctca

SEQ ID NO: 1028 - DNA, 25 bp, artificial sequence
  antisense probe sequence
tgacattgtcacacagaaattacac

SEQ ID NO: 1029 - DNA, 25 bp, artificial sequence
  antisense probe sequence
acattttatgtgccagaagccttaa

SEQ ID NO: 1030 - DNA, 25 bp, artificial sequence
  antisense probe sequence
tgtgccagaagccttaaacatcttt

SEQ ID NO: 1031 - DNA, 25 bp, artificial sequence
  antisense probe sequence
gcaaaacaatgcccatttgtcggct

SEQ ID NO: 1032 - DNA, 25 bp, artificial sequence
  antisense probe sequence
aatgcccatttgtcggcttacagct

SEQ ID NO: 1033 - DNA, 25 bp, artificial sequence
  antisense probe sequence
gtctagagcctgttggtgttctgtc

SEQ ID NO: 1034 - DNA, 25 bp, artificial sequence
  antisense probe sequence
ggtgttctgtccctactttaagaat

SEQ ID NO: 1035 - DNA, 25 bp, artificial sequence
  antisense probe sequence
aatttaattgctcacttattctgaa

SEQ ID NO: 1036 - DNA, 25 bp, artificial sequence
  antisense probe sequence
gcgcttcttccaggacaagcgcccg

SEQ ID NO: 1037 - DNA, 25 bp, artificial sequence
  antisense probe sequence
gcatatgagacttgggggtccctcc

SEQ ID NO: 1038 - DNA, 25 bp, artificial sequence
  antisense probe sequence
aaacgggagtgtgcagtcagggcct

SEQ ID NO: 1039 - DNA, 25 bp, artificial sequence
  antisense probe sequence
tagaagggacggctcagtggctgca

SEQ ID NO: 1040 - DNA, 25 bp, artificial sequence
  antisense probe sequence
gacggtcctggaaatctcacatggt

SEQ ID NO: 1041 - DNA, 25 bp, artificial sequence
  antisense probe sequence
tgggcactgcagcgttggaacgtga

SEQ ID NO: 1042 - DNA, 25 bp, artificial sequence
  antisense probe sequence
tggaacgtgagcctcggatttcctg

SEQ ID NO: 1043 - DNA, 25 bp, artificial sequence
  antisense probe sequence
gcccctctactgtaaatgtgcctta

SEQ ID NO: 1044 - DNA, 25 bp, artificial sequence
  antisense probe sequence
ggccctccaagccaggttgaggtct

SEQ ID NO: 1045 - DNA, 25 bp, artificial sequence
  antisense probe sequence
ggccccacacaggcatgagggatgg

SEQ ID NO: 1046 - DNA, 25 bp, artificial sequence
  antisense probe sequence
tggcccggccaaagtctaggcagaa

SEQ ID NO: 1047 - DNA, 25 bp, artificial sequence
  antisense probe sequence
tggggacctgtcaggctttgtcatt

SEQ ID NO: 1048 - DNA, 25 bp, artificial sequence
  antisense probe sequence
tttcccagtttgttggtggtgcctt

SEQ ID NO: 1049 - DNA, 25 bp, artificial sequence
  antisense probe sequence
gtgcctttagtggttccctaatttg

SEQ ID NO: 1050 - DNA, 25 bp, artificial sequence
  antisense probe sequence
ttgggaacactgatggggccttgga

SEQ ID NO: 1051 - DNA, 25 bp, artificial sequence
  antisense probe sequence
tgcactggcacatatggtcaccttg

SEQ ID NO: 1052 - DNA, 25 bp, artificial sequence
  antisense probe sequence
tggagggcagacctaggagcccctc

SEQ ID NO: 1053 - DNA, 25 bp, artificial sequence
  antisense probe sequence
aggaccccccaaagctgaggggctg

SEQ ID NO: 1054 - DNA, 25 bp, artificial sequence
  antisense probe sequence
ggggctgaatgtagccttttcaaca

SEQ ID NO: 1055 - DNA, 25 bp, artificial sequence
  antisense probe sequence
aaggctcccacttgagagcagcctc

SEQ ID NO: 1056 - DNA, 25 bp, artificial sequence
  antisense probe sequence
cctcgcttcttcagctaaaactcca

SEQ ID NO: 1057 - DNA, 25 bp, artificial sequence
  antisense probe sequence
gtgggtcattgcggtcttagattat

SEQ ID NO: 1058 - DNA, 25 bp, artificial sequence
  antisense probe sequence
taggcatgattccaactggctgcat

SEQ ID NO: 1059 - DNA, 25 bp, artificial sequence
  antisense probe sequence
ccccgcgttgttgaatgtccagaaa

SEQ ID NO: 1060 - DNA, 25 bp, artificial sequence
  antisense probe sequence
aatgcagtttatccctggttctgag

SEQ ID NO: 1061 - DNA, 25 bp, artificial sequence
  antisense probe sequence
tagatagttctgcctcttttttttt

SEQ ID NO: 1062 - DNA, 25 bp, artificial sequence
  antisense probe sequence
gtgtgtggcctttgcatcatttatc

SEQ ID NO: 1063 - DNA, 25 bp, artificial sequence
  antisense probe sequence
gaggtctcagctcttggaggagggc

SEQ ID NO: 1064 - DNA, 25 bp, artificial sequence
  antisense probe sequence
aaccctcactagcaggactggtggt

SEQ ID NO: 1065 - DNA, 25 bp, artificial sequence
  antisense probe sequence
gtctcacctggggcctagagtggaa

SEQ ID NO: 1066 - DNA, 25 bp, artificial sequence
  antisense probe sequence
gggtgggttaacctcacacaagcac

SEQ ID NO: 1067 - DNA, 25 bp, artificial sequence
  antisense probe sequence
caagcacagatcccagactttgcca

SEQ ID NO: 1068 - DNA, 25 bp, artificial sequence
  antisense probe sequence
aggcaaacagggaattccgccgata

SEQ ID NO: 1069 - DNA, 25 bp, artificial sequence
  antisense probe sequence
taatatctttgggtcttactatttt

SEQ ID NO: 1070 - DNA, 25 bp, artificial sequence
  antisense probe sequence
cataaaagtgaccaggtagaccctt

SEQ ID NO: 1071 - DNA, 25 bp, artificial sequence
  antisense probe sequence
taattacattcactacttctaccac

SEQ ID NO: 1072 - DNA, 25 bp, artificial sequence
  antisense probe sequence
attcactacttctaccacttgtgta

SEQ ID NO: 1073 - DNA, 25 bp, artificial sequence
  antisense probe sequence
accacttgtgtatctctagccaatg

SEQ ID NO: 1074 - DNA, 25 bp, artificial sequence
  antisense probe sequence
gtatctctagccaatgtgcttgcaa

SEQ ID NO: 1075 - DNA, 25 bp, artificial sequence
  antisense probe sequence
gtgcttgcaagtgtacagatctgtg

SEQ ID NO: 1076 - DNA, 25 bp, artificial sequence
  antisense probe sequence
atgtgtgtatatttacctcttcgtt

SEQ ID NO: 1077 - DNA, 25 bp, artificial sequence
  antisense probe sequence
tttacctcttcgtttgctcaaacat

SEQ ID NO: 1078 - DNA, 25 bp, artificial sequence
  antisense probe sequence
tgttgtttttgaggcgcgtctcacc

SEQ ID NO: 1079 - DNA, 25 bp, artificial sequence
  antisense probe sequence
catgctcagccattaaggtattttg

SEQ ID NO: 1080 - DNA, 25 bp, artificial sequence
  antisense probe sequence
aggaaataacccagttctgcaccac

SEQ ID NO: 1081 - DNA, 25 bp, artificial sequence
  antisense probe sequence
ccactggtttttgtagctatctcgt

SEQ ID NO: 1082 - DNA, 25 bp, artificial sequence
  antisense probe sequence
ctatctcgtaaggctgctggctgaa

SEQ ID NO: 1083 - DNA, 25 bp, artificial sequence
  antisense probe sequence
ctgaaaactgtgtctatgcaacctt

SEQ ID NO: 1084 - DNA, 25 bp, artificial sequence
  antisense probe sequence
gcaaccttccaagtgcggagtgtca

SEQ ID NO: 1085 - DNA, 25 bp, artificial sequence
  antisense probe sequence
gcggagtgtcaaccaactggacggg

SEQ ID NO: 1086 - DNA, 25 bp, artificial sequence
  antisense probe sequence
cgggagagagtactgctcctactcc

SEQ ID NO: 1087 - DNA, 25 bp, artificial sequence
  antisense probe sequence
ctactccaggactctcacaaagctg

SEQ ID NO: 1088 - DNA, 25 bp, artificial sequence
  antisense probe sequence
aactggcaacatcttacagactact

SEQ ID NO: 1089 - DNA, 25 bp, artificial sequence
  antisense probe sequence
gactactgacttgaagacaacctct

SEQ ID NO: 1090 - DNA, 25 bp, artificial sequence
  antisense probe sequence
atgatggttacacttttggttccta

SEQ ID NO: 1091 - DNA, 25 bp, artificial sequence
  antisense probe sequence
aacttaagatggacacagctgactg

SEQ ID NO: 1092 - DNA, 25 bp, artificial sequence
  antisense probe sequence
agatggacacagctgactggacccc

SEQ ID NO: 1093 - DNA, 25 bp, artificial sequence
  antisense probe sequence
cacttctatgtctctggaccacagg

SEQ ID NO: 1094 - DNA, 25 bp, artificial sequence
  antisense probe sequence
ggcaagtgggctgatggggtccgcc

SEQ ID NO: 1095 - DNA, 25 bp, artificial sequence
  antisense probe sequence
gtctcctggacaaggagtttccagc

SEQ ID NO: 1096 - DNA, 25 bp, artificial sequence
  antisense probe sequence
cctggacaaggagtttccagctgct

SEQ ID NO: 1097 - DNA, 25 bp, artificial sequence
  antisense probe sequence
ggctggagtctcaggccaaattgca

SEQ ID NO: 1098 - DNA, 25 bp, artificial sequence
  antisense probe sequence
aggccaaattgcagagggtcctcca

SEQ ID NO: 1099 - DNA, 25 bp, artificial sequence
  antisense probe sequence
cagggtcctgaagagcactggacta

SEQ ID NO: 1100 - DNA, 25 bp, artificial sequence
  antisense probe sequence
cctgaagagcactggactaagagtc

SEQ ID NO: 1101 - DNA, 25 bp, artificial sequence
  antisense probe sequence
actaagagtctagtggttccagggc

SEQ ID NO: 1102 - DNA, 25 bp, artificial sequence
  antisense probe sequence
gcaaacatccggaagtatcccacca

SEQ ID NO: 1103 - DNA, 25 bp, artificial sequence
  antisense probe sequence
tatcccaccaagaaacaacagctcc

SEQ ID NO: 1104 - DNA, 25 bp, artificial sequence
  antisense probe sequence
tatttccagttacttgcctgcattc

SEQ ID NO: 1105 - DNA, 25 bp, artificial sequence
  antisense probe sequence
taataggtttgcccttgcatctcat

SEQ ID NO: 1106 - DNA, 25 bp, artificial sequence
  antisense probe sequence
gggactgtggtccattgtacaagcc

SEQ ID NO: 1107 - DNA, 25 bp, artificial sequence
  antisense probe sequence
gaatttgggtacatggactacgccc

SEQ ID NO: 1108 - DNA, 25 bp, artificial sequence
  antisense probe sequence
ggactacgcccaagcaaggtttgat

SEQ ID NO: 1109 - DNA, 25 bp, artificial sequence
  antisense probe sequence
gaagcttggggtgtgactgtgggga

SEQ ID NO: 1110 - DNA, 25 bp, artificial sequence
  antisense probe sequence
acctcatcactggactgcatgggga

SEQ ID NO: 1111 - DNA, 25 bp, artificial sequence
  antisense probe sequence
gtggcaggaggctttgggtggctca

SEQ ID NO: 1112 - DNA, 25 bp, artificial sequence
  antisense probe sequence
tttgggtggctcactactgaacaca

SEQ ID NO: 1113 - DNA, 25 bp, artificial sequence
  antisense probe sequence
aggttatgccatatcagagggaaat

SEQ ID NO: 1114 - DNA, 25 bp, artificial sequence
  antisense probe sequence
attatattggttggtctacgggact

SEQ ID NO: 1115 - DNA, 25 bp, artificial sequence
  antisense probe sequence
ggtctacgggactatcaggataaca

SEQ ID NO: 1116 - DNA, 25 bp, artificial sequence
  antisense probe sequence
gctagaagcctgaaggcatatggcg

SEQ ID NO: 1117 - DNA, 25 bp, artificial sequence
  antisense probe sequence
gatgaaatccagtttgacgatattg

SEQ ID NO: 1118 - DNA, 25 bp, artificial sequence
  antisense probe sequence
agtgtttttacatgacaagttctct

SEQ ID NO: 1119 - DNA, 25 bp, artificial sequence
  antisense probe sequence
gaggatggttctacagttgggattt

SEQ ID NO: 1120 - DNA, 25 bp, artificial sequence
  antisense probe sequence
ttgggattttggccatcatcaacca

SEQ ID NO: 1121 - DNA, 25 bp, artificial sequence
  antisense probe sequence
aaattcatttagtgtgtagtttctg

SEQ ID NO: 1122 - DNA, 25 bp, artificial sequence
  antisense probe sequence
aaaagaccataatatttgctgttaa

SEQ ID NO: 1123 - DNA, 25 bp, artificial sequence
  antisense probe sequence
aataaacgagtgcctttcctactgt

SEQ ID NO: 1124 - DNA, 25 bp, artificial sequence
  antisense probe sequence
cctttcctactgtgataacgtcaag

SEQ ID NO: 1125 - DNA, 25 bp, artificial sequence
  antisense probe sequence
gaatacatttctgcctgataatcat

SEQ ID NO: 1126 - DNA, 25 bp, artificial sequence
  antisense probe sequence
tgcctgataatcatgctgagttcta

SEQ ID NO: 1127 - DNA, 25 bp, artificial sequence
  antisense probe sequence
tgagttctaataagccctacttcca

SEQ ID NO: 1128 - DNA, 25 bp, artificial sequence
  antisense probe sequence
ctacttccacctaatctgtttacag

SEQ ID NO: 1129 - DNA, 25 bp, artificial sequence
  antisense probe sequence
gtttcagttacttagatggtctcat

SEQ ID NO: 1130 - DNA, 25 bp, artificial sequence
  antisense probe sequence
gatggtctcataaggtttctgatac

SEQ ID NO: 1131 - DNA, 25 bp, artificial sequence
  antisense probe sequence
tcatcctttgtgcctcggttattaa

SEQ ID NO: 1132 - DNA, 25 bp, artificial sequence
  antisense probe sequence
gaaaccgaacaataagtggcaacca

SEQ ID NO: 1133 - DNA, 25 bp, artificial sequence
  antisense probe sequence
ggaaatactggggtgccattttgtt

SEQ ID NO: 1134 - DNA, 25 bp, artificial sequence
  antisense probe sequence
ttgtaatccactgttttggctttca

SEQ ID NO: 1135 - DNA, 25 bp, artificial sequence
  antisense probe sequence
aatcttctatggctctctttttaat

SEQ ID NO: 1136 - DNA, 25 bp, artificial sequence
  antisense probe sequence
agaccagcctagcagggcattcatc

SEQ ID NO: 1137 - DNA, 25 bp, artificial sequence
  antisense probe sequence
ggcattcatctttgatgttcttcct

SEQ ID NO: 1138 - DNA, 25 bp, artificial sequence
  antisense probe sequence
tcagaatcggcaatgcctggcccac

SEQ ID NO: 1139 - DNA, 25 bp, artificial sequence
  antisense probe sequence
tagttttccatttccagattgcgcc

SEQ ID NO: 1140 - DNA, 25 bp, artificial sequence
  antisense probe sequence
aactctttctaaccaaccgtgatgc

SEQ ID NO: 1141 - DNA, 25 bp, artificial sequence
  antisense probe sequence
atgccacgtaacttaccctatggac

SEQ ID NO: 1142 - DNA, 25 bp, artificial sequence
  antisense probe sequence
agtccagtgtacctgtcatcacgga

SEQ ID NO: 1143 - DNA, 25 bp, artificial sequence
  antisense probe sequence
catcacggacgcactgtggtcacag

SEQ ID NO: 1144 - DNA, 25 bp, artificial sequence
  antisense probe sequence
aatacgaaatactacagccctgctc

SEQ ID NO: 1145 - DNA, 25 bp, artificial sequence
  antisense probe sequence
tgctcccaggtgtgcatcttactgg

SEQ ID NO: 1146 - DNA, 25 bp, artificial sequence
  antisense probe sequence
caccagcaaggacggccaggacggt

SEQ ID NO: 1147 - DNA, 25 bp, artificial sequence
  antisense probe sequence
agcctgccaaggagccgtgttagga

SEQ ID NO: 1148 - DNA, 25 bp, artificial sequence
  antisense probe sequence
gaaatcaggctctcgaagctcataa

SEQ ID NO: 1149 - DNA, 25 bp, artificial sequence
  antisense probe sequence
gaagcaagtgacaaggacgcccgaa

SEQ ID NO: 1150 - DNA, 25 bp, artificial sequence
  antisense probe sequence
gacgcccgaagcacagtggacggtc

SEQ ID NO: 1151 - DNA, 25 bp, artificial sequence
  antisense probe sequence
ggacggtcatgaaggagcgggggtg

SEQ ID NO: 1152 - DNA, 25 bp, artificial sequence
  antisense probe sequence
gtccaggagagggagcgcccctggc

SEQ ID NO: 1153 - DNA, 25 bp, artificial sequence
  antisense probe sequence
ggctgtcgcctgacagcatacctca

SEQ ID NO: 1154 - DNA, 25 bp, artificial sequence
  antisense probe sequence
gcatacctcaaaaggccctagctaa

SEQ ID NO: 1155 - DNA, 25 bp, artificial sequence
  antisense probe sequence
ggttgtgtacaactccacgaggtga

SEQ ID NO: 1156 - DNA, 25 bp, artificial sequence
  antisense probe sequence
taaagactatgatctcatcccaata

SEQ ID NO: 1157 - DNA, 25 bp, artificial sequence
  antisense probe sequence
ccggctatgggctcgagccgagttc

SEQ ID NO: 1158 - DNA, 25 bp, artificial sequence
  antisense probe sequence
gggcgccaaggagcagagggactcg

SEQ ID NO: 1159 - DNA, 25 bp, artificial sequence
  antisense probe sequence
ggactcggacttggcggccgagagt

SEQ ID NO: 1160 - DNA, 25 bp, artificial sequence
  antisense probe sequence
ggccgagagtaacttccggatctac

SEQ ID NO: 1161 - DNA, 25 bp, artificial sequence
  antisense probe sequence
tctacccctggatgcgaagctcagg

SEQ ID NO: 1162 - DNA, 25 bp, artificial sequence
  antisense probe sequence
caggaactgaccgcaaacgaggccg

SEQ ID NO: 1163 - DNA, 25 bp, artificial sequence
  antisense probe sequence
cgctaccagaccctggagctggaga

SEQ ID NO: 1164 - DNA, 25 bp, artificial sequence
  antisense probe sequence
agaatttcactacaatcgctacctg

SEQ ID NO: 1165 - DNA, 25 bp, artificial sequence
  antisense probe sequence
acgctctgcctcacggaaagacaga

SEQ ID NO: 1166 - DNA, 25 bp, artificial sequence
  antisense probe sequence
accaccggccaagacagggctgaag

SEQ ID NO: 1167 - DNA, 25 bp, artificial sequence
  antisense probe sequence
gcccagctctgggaactgaatcagg

SEQ ID NO: 1168 - DNA, 25 bp, artificial sequence
  antisense probe sequence
agcagcttattgtttctctgaaagt

SEQ ID NO: 1169 - DNA, 25 bp, artificial sequence
  antisense probe sequence
atggcaagttgcatcagaaagcttt

SEQ ID NO: 1170 - DNA, 25 bp, artificial sequence
  antisense probe sequence
gattcccaaacgtggttacattagc

SEQ ID NO: 1171 - DNA, 25 bp, artificial sequence
  antisense probe sequence
aacgtggttacattagccattcatg

SEQ ID NO: 1172 - DNA, 25 bp, artificial sequence
  antisense probe sequence
gccattcatgtatgtcagaagtgca

SEQ ID NO: 1173 - DNA, 25 bp, artificial sequence
  antisense probe sequence
tggggcacttaatggtcaccttgta

SEQ ID NO: 1174 - DNA, 25 bp, artificial sequence
  antisense probe sequence
gtaacagttttgtgtaactcccagt

SEQ ID NO: 1175 - DNA, 25 bp, artificial sequence
  antisense probe sequence
gtaactcccagtgatgctgtacaca

SEQ ID NO: 1176 - DNA, 25 bp, artificial sequence
  antisense probe sequence
gctgtacacatatttgaagggtctt

SEQ ID NO: 1177 - DNA, 25 bp, artificial sequence
  antisense probe sequence
gtgtttttgtgaattgcttggttgt

SEQ ID NO: 1178 - DNA, 25 bp, artificial sequence
  antisense probe sequence
aaattctgagcctgatattgatatg

SEQ ID NO: 1179 - DNA, 25 bp, artificial sequence
  antisense probe sequence
gcccactgcctaaatgatgcccggc

SEQ ID NO: 1180 - DNA, 25 bp, artificial sequence
  antisense probe sequence
gcagatcccagtgagtcatgagcct

SEQ ID NO: 1181 - DNA, 25 bp, artificial sequence
  antisense probe sequence
atgtgggtagaagctttcctgcccc

SEQ ID NO: 1182 - DNA, 25 bp, artificial sequence
  antisense probe sequence
ctctagtagccctcagtgtcgaagg

SEQ ID NO: 1183 - DNA, 25 bp, artificial sequence
  antisense probe sequence
gaaggtgagcttgtaggtgcctgcc

SEQ ID NO: 1184 - DNA, 25 bp, artificial sequence
  antisense probe sequence
gaccatctgggtctgtgtagctggg

SEQ ID NO: 1185 - DNA, 25 bp, artificial sequence
  antisense probe sequence
agagatggggaccagaagcccccca

SEQ ID NO: 1186 - DNA, 25 bp, artificial sequence
  antisense probe sequence
cctgccacctgtcagacttgggtga

SEQ ID NO: 1187 - DNA, 25 bp, artificial sequence
  antisense probe sequence
agtgaggctgttaggtcctgcagtt

SEQ ID NO: 1188 - DNA, 25 bp, artificial sequence
  antisense probe sequence
gttccagagcagtctagggacacca

SEQ ID NO: 1189 - DNA, 25 bp, artificial sequence
  antisense probe sequence
accactgccctgtctttaggaaatc

SEQ ID NO: 1190 - DNA, 25 bp, artificial sequence
  antisense probe sequence
ctggctgggcgtgtaggacggtgag

SEQ ID NO: 1191 - DNA, 25 bp, artificial sequence
  antisense probe sequence
taggacggtgagagcacttctgtct

SEQ ID NO: 1192 - DNA, 25 bp, artificial sequence
  antisense probe sequence
atttatttatcgaggcctctttggt

SEQ ID NO: 1193 - DNA, 25 bp, artificial sequence
  antisense probe sequence
ctccctctacccttgagcaagggca

SEQ ID NO: 1194 - DNA, 25 bp, artificial sequence
  antisense probe sequence
ggaactgaggcctgggtgatttatt

SEQ ID NO: 1195 - DNA, 25 bp, artificial sequence
  antisense probe sequence
gactgactgacagccatgggtggtc

SEQ ID NO: 1196 - DNA, 25 bp, artificial sequence
  antisense probe sequence
ggtggtcagatggtggggtgggccc

SEQ ID NO: 1197 - DNA, 25 bp, artificial sequence
  antisense probe sequence
gctgccccccaggatggatatgaga

SEQ ID NO: 1198 - DNA, 25 bp, artificial sequence
  antisense probe sequence
tgggggaccttcactgatgtgggca

SEQ ID NO: 1199 - DNA, 25 bp, artificial sequence
  antisense probe sequence
accctccaatctgcactttgatttg

SEQ ID NO: 1200 - DNA, 25 bp, artificial sequence
  antisense probe sequence
tgatttgcttcctaacagctctgtt

SEQ ID NO: 1201 - DNA, 25 bp, artificial sequence
  antisense probe sequence
taagcagacccggcattggcaatgt

SEQ ID NO: 1202 - DNA, 25 bp, artificial sequence
  antisense probe sequence
ggcattggcaatgtagctgtaattt

SEQ ID NO: 1203 - DNA, 25 bp, artificial sequence
  antisense probe sequence
tttctcttgagttttgttatgtgtt

SEQ ID NO: 1204 - DNA, 25 bp, artificial sequence
  antisense probe sequence
gattgtctggtatatttacagtcct

SEQ ID NO: 1205 - DNA, 25 bp, artificial sequence
  antisense probe sequence
tttacagtcctcaaacatggttatt

SEQ ID NO: 1206 - DNA, 25 bp, artificial sequence
  antisense probe sequence
aacatggttatttctgtcagtgact

SEQ ID NO: 1207 - DNA, 25 bp, artificial sequence
  antisense probe sequence
aacattcggttttaccagccagcag

SEQ ID NO: 1208 - DNA, 25 bp, artificial sequence
  antisense probe sequence
accagccagcagtattcttcagtaa

SEQ ID NO: 1209 - DNA, 25 bp, artificial sequence
  antisense probe sequence
aatcattgaacctcgagtcactgta

SEQ ID NO: 1210 - DNA, 25 bp, artificial sequence
  antisense probe sequence
tattagttttagatgctggcaccgc

SEQ ID NO: 1211 - DNA, 25 bp, artificial sequence
  antisense probe sequence
ggcaccgcatgtgctctgtttattc

SEQ ID NO: 1212 - DNA, 25 bp, artificial sequence
  antisense probe sequence
agaagtgccttcttggttggaaaat

SEQ ID NO: 1213 - DNA, 25 bp, artificial sequence
  antisense probe sequence
caagggtggcagtcgtggacgatct

SEQ ID NO: 1214 - DNA, 25 bp, artificial sequence
  antisense probe sequence
gattcagtggaggatttggtgccag

SEQ ID NO: 1215 - DNA, 25 bp, artificial sequence
  antisense probe sequence
tatcgacaaagtagtggttccagca

SEQ ID NO: 1216 - DNA, 25 bp, artificial sequence
  antisense probe sequence
ggctttggtgctagtcgcggaagca

SEQ ID NO: 1217 - DNA, 25 bp, artificial sequence
  antisense probe sequence
ggctatggaggcttctacaatagtg

SEQ ID NO: 1218 - DNA, 25 bp, artificial sequence
  antisense probe sequence
ggggcaactgaatctgctttgcagc

SEQ ID NO: 1219 - DNA, 25 bp, artificial sequence
  antisense probe sequence
ctttgcagcaaagtcacccttacaa

SEQ ID NO: 1220 - DNA, 25 bp, artificial sequence
  antisense probe sequence
gctgtgattctcctgataattcaag

SEQ ID NO: 1221 - DNA, 25 bp, artificial sequence
  antisense probe sequence
ataattcaagggagctcaaagtcac

SEQ ID NO: 1222 - DNA, 25 bp, artificial sequence
  antisense probe sequence
agatgtaattgctctagtttggatt

SEQ ID NO: 1223 - DNA, 25 bp, artificial sequence
  antisense probe sequence
attatataactctttgagcctttat

SEQ ID NO: 1224 - DNA, 25 bp, artificial sequence
  antisense probe sequence
gagcctttattggtaaattctggta

SEQ ID NO: 1225 - DNA, 25 bp, artificial sequence
  antisense probe sequence
aatttgggtgactagaacaacttga

SEQ ID NO: 1226 - DNA, 25 bp, artificial sequence
  antisense probe sequence
gtagcaataagctggactagtgtcc

SEQ ID NO: 1227 - DNA, 25 bp, artificial sequence
  antisense probe sequence
gtgtcctaaaaatggctaactgatg

SEQ ID NO: 1228 - DNA, 25 bp, artificial sequence
  antisense probe sequence
gtgacagtttcttttgtgttcctat

SEQ ID NO: 1229 - DNA, 25 bp, artificial sequence
  antisense probe sequence
gttcctatggaaacattttatactg

SEQ ID NO: 1230 - DNA, 25 bp, artificial sequence
  antisense probe sequence
tgtgtatgttttatatcaaatgcct

SEQ ID NO: 1231 - DNA, 25 bp, artificial sequence
  antisense probe sequence
tcaaatgccttcatgaatctttcat

SEQ ID NO: 1232 - DNA, 25 bp, artificial sequence
  antisense probe sequence
aaacccaatacttttgtccaatgtg

SEQ ID NO: 1233 - DNA, 25 bp, artificial sequence
  antisense probe sequence
acttttgtccaatgtggttggtcaa

SEQ ID NO: 1234 - DNA, 25 bp, artificial sequence
  antisense probe sequence
acttcttctctcatgaatcatccag

SEQ ID NO: 1235 - DNA, 25 bp, artificial sequence
  antisense probe sequence
aaataagttctcacctacccttgag

SEQ ID NO: 1236 - DNA, 25 bp, artificial sequence
  antisense probe sequence
gagctgcaaggtgaattctctccat

SEQ ID NO: 1237 - DNA, 25 bp, artificial sequence
  antisense probe sequence
ctccattacagtcatctttgccttg

SEQ ID NO: 1238 - DNA, 25 bp, artificial sequence
  antisense probe sequence
ttgccttgtgacattcatctggtta

SEQ ID NO: 1239 - DNA, 25 bp, artificial sequence
  antisense probe sequence
atgggcactccaatgaggcagcctt

SEQ ID NO: 1240 - DNA, 25 bp, artificial sequence
  antisense probe sequence
aagggtttgattgtcggttctctag

SEQ ID NO: 1241 - DNA, 25 bp, artificial sequence
  antisense probe sequence
agggctgttttgttctactactcag

SEQ ID NO: 1242 - DNA, 25 bp, artificial sequence
  antisense probe sequence
tgtcgaaagtctcacaccttcatca

SEQ ID NO: 1243 - DNA, 25 bp, artificial sequence
  antisense probe sequence
tcactatccttgatgcattcacctc

SEQ ID NO: 1244 - DNA, 25 bp, artificial sequence
  antisense probe sequence
cattggcttttatacctttcttggt

SEQ ID NO: 1245 - DNA, 25 bp, artificial sequence
  antisense probe sequence
agatccgagtgcactcgcgaggcaa

SEQ ID NO: 1246 - DNA, 25 bp, artificial sequence
  antisense probe sequence
ccaccggtcacttcatgggcaagaa

SEQ ID NO: 1247 - DNA, 25 bp, artificial sequence
  antisense probe sequence
gggaccagcgactgcagctgagtca

SEQ ID NO: 1248 - DNA, 25 bp, artificial sequence
  antisense probe sequence
gagtcatgatctgctcggaatcctc

SEQ ID NO: 1249 - DNA, 25 bp, artificial sequence
  antisense probe sequence
tgctcggaatcctcctgctaaagaa

SEQ ID NO: 1250 - DNA, 25 bp, artificial sequence
  antisense probe sequence
gcaccccaaatccagtacaggaggc

SEQ ID NO: 1251 - DNA, 25 bp, artificial sequence
  antisense probe sequence
taggggcagacacaacagcgtggct

SEQ ID NO: 1252 - DNA, 25 bp, artificial sequence
  antisense probe sequence
agcgtggcttagattgtgcccaccc

SEQ ID NO: 1253 - DNA, 25 bp, artificial sequence
  antisense probe sequence
gtgcccacccagggaaggtgctgaa

SEQ ID NO: 1254 - DNA, 25 bp, artificial sequence
  antisense probe sequence
tgaatgggaccctgttgatggcccc

SEQ ID NO: 1255 - DNA, 25 bp, artificial sequence
  antisense probe sequence
aatctctgttactccattactgtga

SEQ ID NO: 1256 - DNA, 25 bp, artificial sequence
  antisense probe sequence
cagcccctgaagaaaattcacgtga

SEQ ID NO: 1257 - DNA, 25 bp, artificial sequence
  antisense probe sequence
gatgatgatacattccaagtcttca

SEQ ID NO: 1258 - DNA, 25 bp, artificial sequence
  antisense probe sequence
gacaaactttgcaggacttccctta

SEQ ID NO: 1259 - DNA, 25 bp, artificial sequence
  antisense probe sequence
gcaggacttcccttataaagcaaaa

SEQ ID NO: 1260 - DNA, 25 bp, artificial sequence
  antisense probe sequence
gttcagcttccaattagtattcttt

SEQ ID NO: 1261 - DNA, 25 bp, artificial sequence
  antisense probe sequence
tatatttctttcattgggcgctttc

SEQ ID NO: 1262 - DNA, 25 bp, artificial sequence
  antisense probe sequence
ctttcccatctccaactcggaagta

SEQ ID NO: 1263 - DNA, 25 bp, artificial sequence
  antisense probe sequence
gaagtaagcccaagagaacaacata

SEQ ID NO: 1264 - DNA, 25 bp, artificial sequence
  antisense probe sequence
gaatacaccaaaaggaggcgctctt

SEQ ID NO: 1265 - DNA, 25 bp, artificial sequence
  antisense probe sequence
aaatccaaatttctctcaatgttag

SEQ ID NO: 1266 - DNA, 25 bp, artificial sequence
  antisense probe sequence
gatttaattccctcaataacaccaa

SEQ ID NO: 1267 - DNA, 25 bp, artificial sequence
  antisense probe sequence
caattcctattcattcttagcactt

SEQ ID NO: 1268 - DNA, 25 bp, artificial sequence
  antisense probe sequence
ttcttagcactttgacatgtcttgg

SEQ ID NO: 1269 - DNA, 25 bp, artificial sequence
  antisense probe sequence
gaaagatcaattatatccatgctta

SEQ ID NO: 1270 - DNA, 25 bp, artificial sequence
  antisense probe sequence
gcttaacaggatcagcaggagcttt

SEQ ID NO: 1271 - DNA, 25 bp, artificial sequence
  antisense probe sequence
taataagggattgatctttcttttt

SEQ ID NO: 1272 - DNA, 25 bp, artificial sequence
  antisense probe sequence
tctttttttgttatcgaggcttttg

SEQ ID NO: 1273 - DNA, 25 bp, artificial sequence
  antisense probe sequence
gtgtgttctgctttatatgttatat

SEQ ID NO: 1274 - DNA, 25 bp, artificial sequence
  antisense probe sequence
tcaatatcttttcagatgcagtcta

SEQ ID NO: 1275 - DNA, 25 bp, artificial sequence
  antisense probe sequence
gatgcagtctatattttatgctgag

SEQ ID NO: 1276 - DNA, 25 bp, artificial sequence
  antisense probe sequence
aatatacacatgtcgcgtaatcgta

SEQ ID NO: 1277 - DNA, 25 bp, artificial sequence
  antisense probe sequence
tgagcatcttagtctttaaaacaca

SEQ ID NO: 1278 - DNA, 25 bp, artificial sequence
  antisense probe sequence
gccgtcacccgaagtcagaaacgtg

SEQ ID NO: 1279 - DNA, 25 bp, artificial sequence
  antisense probe sequence
tcactatctaccttcagctcagaga

SEQ ID NO: 1280 - DNA, 25 bp, artificial sequence
  antisense probe sequence
aaggcacagctagtgaaccttcccc

SEQ ID NO: 1281 - DNA, 25 bp, artificial sequence
  antisense probe sequence
ccccagtggcacacctgaagttggc

SEQ ID NO: 1282 - DNA, 25 bp, artificial sequence
  antisense probe sequence
gcagcaccaacactgatgagcggcc

SEQ ID NO: 1283 - DNA, 25 bp, artificial sequence
  antisense probe sequence
gagcggtctgatgacatgtgctccc

SEQ ID NO: 1284 - DNA, 25 bp, artificial sequence
  antisense probe sequence
cagggctcagaaatcccactggacc

SEQ ID NO: 1285 - DNA, 25 bp, artificial sequence
  antisense probe sequence
ccattccacaccaggaacttctcag

SEQ ID NO: 1286 - DNA, 25 bp, artificial sequence
  antisense probe sequence
gccctcccaattctgaggactcaga

SEQ ID NO: 1287 - DNA, 25 bp, artificial sequence
  antisense probe sequence
actccaacagcgttgatgccttgcg

SEQ ID NO: 1288 - DNA, 25 bp, artificial sequence
  antisense probe sequence
tgaaagccactcgtattccttgtac

SEQ ID NO: 1289 - DNA, 25 bp, artificial sequence
  antisense probe sequence
tcaagaattcactgatctgatgcaa

SEQ ID NO: 1290 - DNA, 25 bp, artificial sequence
  antisense probe sequence
tatcattacatcttgaacccaggaa

SEQ ID NO: 1291 - DNA, 25 bp, artificial sequence
  antisense probe sequence
atagataattccacgttgcctttgt

SEQ ID NO: 1292 - DNA, 25 bp, artificial sequence
  antisense probe sequence
acgttgcctttgtgatttgtatata

SEQ ID NO: 1293 - DNA, 25 bp, artificial sequence
  antisense probe sequence
atattttacttgttccatccacagt

SEQ ID NO: 1294 - DNA, 25 bp, artificial sequence
  antisense probe sequence
ttccatccacagttctctacagaaa

SEQ ID NO: 1295 - DNA, 25 bp, artificial sequence
  antisense probe sequence
aatggtctgttttcgtgatattcgt

SEQ ID NO: 1296 - DNA, 25 bp, artificial sequence
  antisense probe sequence
gttaactagcattctgttttacatg

SEQ ID NO: 1297 - DNA, 25 bp, artificial sequence
  antisense probe sequence
catgttgacatttctaacacacaca

SEQ ID NO: 1298 - DNA, 25 bp, artificial sequence
  antisense probe sequence
cacacacaccactgatttgaacttc

SEQ ID NO: 1299 - DNA, 25 bp, artificial sequence
  antisense probe sequence
atatatgctaggtctgattctgaag

SEQ ID NO: 1300 - DNA, 25 bp, artificial sequence
  antisense probe sequence
ggaactctaaaccttgtgatgacta

SEQ ID NO: 1301 - DNA, 25 bp, artificial sequence
  antisense probe sequence
atcactttaagttttgacacctaga

SEQ ID NO: 1302 - DNA, 25 bp, artificial sequence
  antisense probe sequence
gtcttagtaatagcatccactggaa

SEQ ID NO: 1303 - DNA, 25 bp, artificial sequence
  antisense probe sequence
tcagcatttaacttacatttgtact

SEQ ID NO: 1304 - DNA, 25 bp, artificial sequence
  antisense probe sequence
tttatatagtctacagttgtcctga

SEQ ID NO: 1305 - DNA, 25 bp, artificial sequence
  antisense probe sequence
agttgtcctgatttcttattgaatt

SEQ ID NO: 1306 - DNA, 25 bp, artificial sequence
  antisense probe sequence
gaatttgttagactagttctcttgt

SEQ ID NO: 1307 - DNA, 25 bp, artificial sequence
  antisense probe sequence
gttctcttgtcttgtgatctgtgta

SEQ ID NO: 1308 - DNA, 25 bp, artificial sequence
  antisense probe sequence
tttagtcactaagactttcctccaa

SEQ ID NO: 1309 - DNA, 25 bp, artificial sequence
  antisense probe sequence
tttcctccaagaactaagccaactt

SEQ ID NO: 1310 - DNA, 25 bp, artificial sequence
  antisense probe sequence
acggctgtatataatggtgatgtca

SEQ ID NO: 1311 - DNA, 25 bp, artificial sequence
  antisense probe sequence
atctattttattatggtttcccttg

SEQ ID NO: 1312 - DNA, 25 bp, artificial sequence
  antisense probe sequence
ggtttcccttgtatctatttgtggt

SEQ ID NO: 1313 - DNA, 25 bp, artificial sequence
  antisense probe sequence
gactactatgaacagttttctttta

SEQ ID NO: 1314 - DNA, 25 bp, artificial sequence
  antisense probe sequence
atgccaggaatattgtcatcctttg

SEQ ID NO: 1315 - DNA, 25 bp, artificial sequence
  antisense probe sequence
gactgccaataacattcttcgatct

SEQ ID NO: 1316 - DNA, 25 bp, artificial sequence
  antisense probe sequence
ataacattcttcgatctctgggatt

SEQ ID NO: 1317 - DNA, 25 bp, artificial sequence
  antisense probe sequence
gatctctgggatttatgctcatgaa

SEQ ID NO: 1318 - DNA, 25 bp, artificial sequence
  antisense probe sequence
ggatagctcattaagaagtgcagca

SEQ ID NO: 1319 - DNA, 25 bp, artificial sequence
  antisense probe sequence
agtgcagcaggttaagaattttttc

SEQ ID NO: 1320 - DNA, 25 bp, artificial sequence
  antisense probe sequence
gaattttttcctaaagactgtatat

SEQ ID NO: 1321 - DNA, 25 bp, artificial sequence
  antisense probe sequence
gaaaattcataacgtgtatctttaa

SEQ ID NO: 1322 - DNA, 25 bp, artificial sequence
  antisense probe sequence
gaaatactcagcttaggcattttta

SEQ ID NO: 1323 - DNA, 25 bp, artificial sequence
  antisense probe sequence
tgcatagaattgttaccaacctcca

SEQ ID NO: 1324 - DNA, 25 bp, artificial sequence
  antisense probe sequence
tgttaccaacctccaaagggctctt

SEQ ID NO: 1325 - DNA, 25 bp, artificial sequence
  antisense probe sequence
caaagggctctttaaaatcatattt

SEQ ID NO: 1326 - DNA, 25 bp, artificial sequence
  antisense probe sequence
tattcatttgaggatgtcttataaa

SEQ ID NO: 1327 - DNA, 25 bp, artificial sequence
  antisense probe sequence
aggtcagaatgcttacgggtgttat

SEQ ID NO: 1328 - DNA, 25 bp, artificial sequence
  antisense probe sequence
cagaatgcttacgggtgttattttt

SEQ ID NO: 1329 - DNA, 25 bp, artificial sequence
  antisense probe sequence
taagttgttgaattccttaatttag

SEQ ID NO: 1330 - DNA, 25 bp, artificial sequence
  antisense probe sequence
gctcattattttttgcacactcaca

SEQ ID NO: 1331 - DNA, 25 bp, artificial sequence
  antisense probe sequence
ttctctctcagaaatcaatggcatt

SEQ ID NO: 1332 - DNA, 25 bp, artificial sequence
  antisense probe sequence
tcaatggcatttgaaccaccaaaaa

SEQ ID NO: 1333 - DNA, 25 bp, artificial sequence
  antisense probe sequence
ccagctgttgctggtttgtcatgcc

SEQ ID NO: 1334 - DNA, 25 bp, artificial sequence
  antisense probe sequence
ggagcaactgggcactaaacatggt

SEQ ID NO: 1335 - DNA, 25 bp, artificial sequence
  antisense probe sequence
gctggcctgtcttgtcgagtgagac

SEQ ID NO: 1336 - DNA, 25 bp, artificial sequence
  antisense probe sequence
gccttggtagtgatagtgcccttgg

SEQ ID NO: 1337 - DNA, 25 bp, artificial sequence
  antisense probe sequence
gtgcccttggtgattctaatagtcc

SEQ ID NO: 1338 - DNA, 25 bp, artificial sequence
  antisense probe sequence
gaagcactgctcatatcaggacatc

SEQ ID NO: 1339 - DNA, 25 bp, artificial sequence
  antisense probe sequence
tcaggacatcctgtgagactcttcc

SEQ ID NO: 1340 - DNA, 25 bp, artificial sequence
  antisense probe sequence
tgactcccccattgtgttaagaacc

SEQ ID NO: 1341 - DNA, 25 bp, artificial sequence
  antisense probe sequence
ccagcaacccaggagcctagtacaa

SEQ ID NO: 1342 - DNA, 25 bp, artificial sequence
  antisense probe sequence
aatatagtgatgccatcccgtcgac

SEQ ID NO: 1343 - DNA, 25 bp, artificial sequence
  antisense probe sequence
ccgtcgactctccatttaaattgtt

SEQ ID NO: 1344 - DNA, 25 bp, artificial sequence
  antisense probe sequence
gatggtaaaggctgttcaaccccaa

SEQ ID NO: 1345 - DNA, 25 bp, artificial sequence
  antisense probe sequence
gctgttcaaccccaagagatgagtc

SEQ ID NO: 1346 - DNA, 25 bp, artificial sequence
  antisense probe sequence
gagtcagatgaagccccatgtgtat

SEQ ID NO: 1347 - DNA, 25 bp, artificial sequence
  antisense probe sequence
cccatgtgtatgatctgccagtaga

SEQ ID NO: 1348 - DNA, 25 bp, artificial sequence
  antisense probe sequence
gccagtagaaggcaatgagccccca

SEQ ID NO: 1349 - DNA, 25 bp, artificial sequence
  antisense probe sequence
cataaagacacaaacgcacttcccc

SEQ ID NO: 1350 - DNA, 25 bp, artificial sequence
  antisense probe sequence
ggataatccaatgtctacacctaag

SEQ ID NO: 1351 - DNA, 25 bp, artificial sequence
  antisense probe sequence
gtctacacctaaggactcaaatcca

SEQ ID NO: 1352 - DNA, 25 bp, artificial sequence
  antisense probe sequence
tactatctcaccagtatttgctctc

SEQ ID NO: 1353 - DNA, 25 bp, artificial sequence
  antisense probe sequence
gtatttgctctcgactcaagaaggt

SEQ ID NO: 1354 - DNA, 25 bp, artificial sequence
  antisense probe sequence
gaacatatgcctgagaacctttgca

SEQ ID NO: 1355 - DNA, 25 bp, artificial sequence
  antisense probe sequence
gctgacatcctgcgagactacaaag

SEQ ID NO: 1356 - DNA, 25 bp, artificial sequence
  antisense probe sequence
tcctgaaaaccctctgaagtaccta

SEQ ID NO: 1357 - DNA, 25 bp, artificial sequence
  antisense probe sequence
gaagtacctatatcctgacattccc

SEQ ID NO: 1358 - DNA, 25 bp, artificial sequence
  antisense probe sequence
caaagccttcggtaaacactacagc

SEQ ID NO: 1359 - DNA, 25 bp, artificial sequence
  antisense probe sequence
gctctcagccttgcgaagtttcaag

SEQ ID NO: 1360 - DNA, 25 bp, artificial sequence
  antisense probe sequence
tccccatctcaacaatccgaagtga

SEQ ID NO: 1361 - DNA, 25 bp, artificial sequence
  antisense probe sequence
aaacctgagtcccacaacaattgaa

SEQ ID NO: 1362 - DNA, 25 bp, artificial sequence
  antisense probe sequence
tgcaatgaagtctccttattctgct

SEQ ID NO: 1363 - DNA, 25 bp, artificial sequence
  antisense probe sequence
agactgttctttgcccaataaccac

SEQ ID NO: 1364 - DNA, 25 bp, artificial sequence
  antisense probe sequence
gacatctgaagctctcttcacactc

SEQ ID NO: 1365 - DNA, 25 bp, artificial sequence
  antisense probe sequence
tcccgtggcactcctcaattgggag

SEQ ID NO: 1366 - DNA, 25 bp, artificial sequence
  antisense probe sequence
gaagcatatccagagggcgaaagat

SEQ ID NO: 1367 - DNA, 25 bp, artificial sequence
  antisense probe sequence
ggcgaaagatatctctccattgtgc

SEQ ID NO: 1368 - DNA, 25 bp, artificial sequence
  antisense probe sequence
catctgcctcttttgacgttggaag

SEQ ID NO: 1369 - DNA, 25 bp, artificial sequence
  antisense probe sequence
ggaagacacatgtcttactccccaa

SEQ ID NO: 1370 - DNA, 25 bp, artificial sequence
  antisense probe sequence
tactccccaaagggagcccagcact

SEQ ID NO: 1371 - DNA, 25 bp, artificial sequence
  antisense probe sequence
ggagccttcttgatgatctcaaaaa

SEQ ID NO: 1372 - DNA, 25 bp, artificial sequence
  antisense probe sequence
gtgactgtgaaaccgtcagttcgga

SEQ ID NO: 1373 - DNA, 25 bp, artificial sequence
  antisense probe sequence
gaaaccgtcagttcggaaggctggt

SEQ ID NO: 1374 - DNA, 25 bp, artificial sequence
  antisense probe sequence
gaaggctggttagaacatgtgggag

SEQ ID NO: 1375 - DNA, 25 bp, artificial sequence
  antisense probe sequence
gtgcttacaattttgtgtaccaact

SEQ ID NO: 1376 - DNA, 25 bp, artificial sequence
  antisense probe sequence
gatttcattgctattgcatagtctc

SEQ ID NO: 1377 - DNA, 25 bp, artificial sequence
  antisense probe sequence
tgagcctggggttctggtgttagaa

SEQ ID NO: 1378 - DNA, 25 bp, artificial sequence
  antisense probe sequence
tattggcatacgttatcagcaactt

SEQ ID NO: 1379 - DNA, 25 bp, artificial sequence
  antisense probe sequence
acttcccctgttcaatagtatggga

SEQ ID NO: 1380 - DNA, 25 bp, artificial sequence
  antisense probe sequence
cacacccacaccgtagaacatatat

SEQ ID NO: 1381 - DNA, 25 bp, artificial sequence
  antisense probe sequence
cacacatcacatttttctggaaaac

SEQ ID NO: 1382 - DNA, 25 bp, artificial sequence
  antisense probe sequence
gacggattttacttctggagacatg

SEQ ID NO: 1383 - DNA, 25 bp, artificial sequence
  antisense probe sequence
gagacatggcatacggttactgact

SEQ ID NO: 1384 - DNA, 25 bp, artificial sequence
  antisense probe sequence
gttactgacttatgagctaccaaaa

SEQ ID NO: 1385 - DNA, 25 bp, artificial sequence
  antisense probe sequence
tttctctgctattaactggctagaa

SEQ ID NO: 1386 - DNA, 25 bp, artificial sequence
  antisense probe sequence
agaagacattcatctatttttcaaa

SEQ ID NO: 1387 - DNA, 25 bp, artificial sequence
  antisense probe sequence
gtttgtatctatttcatgctttact

SEQ ID NO: 1388 - DNA, 25 bp, artificial sequence
  antisense probe sequence
tcttaaatcctactatctcctggcc

SEQ ID NO: 1389 - DNA, 25 bp, artificial sequence
  antisense probe sequence
ctcctggcctggacctcagaaggag

SEQ ID NO: 1390 - DNA, 25 bp, artificial sequence
  antisense probe sequence
ggagctttttgcctatctataattt

SEQ ID NO: 1391 - DNA, 25 bp, artificial sequence
  antisense probe sequence
tgccaatttttgatatcctctctcc

SEQ ID NO: 1392 - DNA, 25 bp, artificial sequence
  antisense probe sequence
cacaccccgatgctcagaagtgtct

SEQ ID NO: 1393 - DNA, 25 bp, artificial sequence
  antisense probe sequence
gaagtgtcttgccagcaacattcct

SEQ ID NO: 1394 - DNA, 25 bp, artificial sequence
  antisense probe sequence
ggagtgatttcctaaaccagtttca

SEQ ID NO: 1395 - DNA, 25 bp, artificial sequence
  antisense probe sequence
gcccaagtgcgtacctttatttttg

SEQ ID NO: 1396 - DNA, 25 bp, artificial sequence
  antisense probe sequence
ccctctttctgtacttcaatttttg

SEQ ID NO: 1397 - DNA, 25 bp, artificial sequence
  antisense probe sequence
ggtgcttcaaaacttgtaccttcat

SEQ ID NO: 1398 - DNA, 25 bp, artificial sequence
  antisense probe sequence
atgactctacctgtggtctatcttt

SEQ ID NO: 1399 - DNA, 25 bp, artificial sequence
  antisense probe sequence
tgttgggaattggtactggctagaa

SEQ ID NO: 1400 - DNA, 25 bp, artificial sequence
  antisense probe sequence
tttgacagccacagcatgttccgaa

SEQ ID NO: 1401 - DNA, 25 bp, artificial sequence
  antisense probe sequence
gttgtacaacatgccctacagctac

SEQ ID NO: 1402 - DNA, 25 bp, artificial sequence
  antisense probe sequence
ctacagctactctttaaatctccaa

SEQ ID NO: 1403 - DNA, 25 bp, artificial sequence
  antisense probe sequence
gaatgggatgagcactcctacaaaa

SEQ ID NO: 1404 - DNA, 25 bp, artificial sequence
  antisense probe sequence
aaggattccagagagctcgcttgct

SEQ ID NO: 1405 - DNA, 25 bp, artificial sequence
  antisense probe sequence
gaaagtgggtccccaccagacattg

SEQ ID NO: 1406 - DNA, 25 bp, artificial sequence
  antisense probe sequence
agacattgaatctgccgcatcttga

SEQ ID NO: 1407 - DNA, 25 bp, artificial sequence
  antisense probe sequence
ctgccgcatcttgatactggacttc

SEQ ID NO: 1408 - DNA, 25 bp, artificial sequence
  antisense probe sequence
ttattacctgtccagtatctttggt

SEQ ID NO: 1409 - DNA, 25 bp, artificial sequence
  antisense probe sequence
gaaaacaccagaggccatacctaat

SEQ ID NO: 1410 - DNA, 25 bp, artificial sequence
  antisense probe sequence
ttgccttgtaattcgacagctctac

SEQ ID NO: 1411 - DNA, 25 bp, artificial sequence
  antisense probe sequence
acttttagtgaccacgggctacatc

SEQ ID NO: 1412 - DNA, 25 bp, artificial sequence
  antisense probe sequence
gggctacatcatatgctttgttcct

SEQ ID NO: 1413 - DNA, 25 bp, artificial sequence
  antisense probe sequence
ataccctcagccagacagaagtcat

SEQ ID NO: 1414 - DNA, 25 bp, artificial sequence
  antisense probe sequence
gaagtcataactgattgctcaacca

SEQ ID NO: 1415 - DNA, 25 bp, artificial sequence
  antisense probe sequence
tgctcaaccaggatttcactcttca

SEQ ID NO: 1416 - DNA, 25 bp, artificial sequence
  antisense probe sequence
aagccaaagaggctacactgctcct

SEQ ID NO: 1417 - DNA, 25 bp, artificial sequence
  antisense probe sequence
tgctttgatcctatcctgtactatc

SEQ ID NO: 1418 - DNA, 25 bp, artificial sequence
  antisense probe sequence
aaagcattccgctcaaaggtcactg

SEQ ID NO: 1419 - DNA, 25 bp, artificial sequence
  antisense probe sequence
tcactgagacttttgcctcacctaa

SEQ ID NO: 1420 - DNA, 25 bp, artificial sequence
  antisense probe sequence
tgctaccaattctggccttactgga

SEQ ID NO: 1421 - DNA, 25 bp, artificial sequence
  antisense probe sequence
gacacatgggtgctattggggttgg

SEQ ID NO: 1422 - DNA, 25 bp, artificial sequence
  antisense probe sequence
tgggggggaggtgaggtaccagcct

SEQ ID NO: 1423 - DNA, 25 bp, artificial sequence
  antisense probe sequence
aggtaccagccttggatactccatg

SEQ ID NO: 1424 - DNA, 25 bp, artificial sequence
  antisense probe sequence
tggacatgggccccagataccatga

SEQ ID NO: 1425 - DNA, 25 bp, artificial sequence
  antisense probe sequence
gataccatgatgctgagcccggaaa

SEQ ID NO: 1426 - DNA, 25 bp, artificial sequence
  antisense probe sequence
cggaaactccacatcctgtgggacc

SEQ ID NO: 1427 - DNA, 25 bp, artificial sequence
  antisense probe sequence
tgtgggacctgggccatagtcattc

SEQ ID NO: 1428 - DNA, 25 bp, artificial sequence
  antisense probe sequence
ctgaaagtcccagatcaagcctgcc

SEQ ID NO: 1429 - DNA, 25 bp, artificial sequence
  antisense probe sequence
caagcctgcctcaatcagtattcat

SEQ ID NO: 1430 - DNA, 25 bp, artificial sequence
  antisense probe sequence
atttatagccaggtaccttctcacc

SEQ ID NO: 1431 - DNA, 25 bp, artificial sequence
  antisense probe sequence
accttctcacctgtgagaccaaatt

SEQ ID NO: 1432 - DNA, 25 bp, artificial sequence
  antisense probe sequence
ttgagttctccttttaagtaccaat

SEQ ID NO: 1433 - DNA, 25 bp, artificial sequence
  antisense probe sequence
ggtgtgtcattgccttgaaatgctt

SEQ ID NO: 1434 - DNA, 25 bp, artificial sequence
  antisense probe sequence
gaaatgcttgcttagggcttctttt

SEQ ID NO: 1435 - DNA, 25 bp, artificial sequence
  antisense probe sequence
tagggcttcttttatgttatcttaa

SEQ ID NO: 1436 - DNA, 25 bp, artificial sequence
  antisense probe sequence
aagtgctggtgaattttccattttt

SEQ ID NO: 1437 - DNA, 25 bp, artificial sequence
  antisense probe sequence
ttccattttttacatccatttcaca

SEQ ID NO: 1438 - DNA, 25 bp, artificial sequence
  antisense probe sequence
gaaaggtaacaatcttcattctaca

SEQ ID NO: 1439 - DNA, 25 bp, artificial sequence
  antisense probe sequence
aatgcgtgcgtttcagtgtttaaga

SEQ ID NO: 1440 - DNA, 25 bp, artificial sequence
  antisense probe sequence
caagcagtttgtgtggtgtttctat

SEQ ID NO: 1441 - DNA, 25 bp, artificial sequence
  antisense probe sequence
aaatctgctggccagctatgtcctc

SEQ ID NO: 1442 - DNA, 25 bp, artificial sequence
  antisense probe sequence
taggaaatgacagacccaaccacca

SEQ ID NO: 1443 - DNA, 25 bp, artificial sequence
  antisense probe sequence
taaccatgacaatcaacgaggacat

SEQ ID NO: 1444 - DNA, 25 bp, artificial sequence
  antisense probe sequence
gttactattaatccagacactactt

SEQ ID NO: 1445 - DNA, 25 bp, artificial sequence
  antisense probe sequence
tgggtctgtgaacatcgatggcgcc

SEQ ID NO: 1446 - DNA, 25 bp, artificial sequence
  antisense probe sequence
tcgatggcgccaaataaggaacatg

SEQ ID NO: 1447 - DNA, 25 bp, artificial sequence
  antisense probe sequence
tccgcaatgtagtggatggccagcc

SEQ ID NO: 1448 - DNA, 25 bp, artificial sequence
  antisense probe sequence
gtagtggatggccagccttttacaa

SEQ ID NO: 1449 - DNA, 25 bp, artificial sequence
  antisense probe sequence
tgataatgggagcaaccaagtggct

SEQ ID NO: 1450 - DNA, 25 bp, artificial sequence
  antisense probe sequence
gtgatgtcatttctggagataaaat

SEQ ID NO: 1451 - DNA, 25 bp, artificial sequence
  antisense probe sequence
tacgtttctgatgatggcaaagctc

SEQ ID NO: 1452 - DNA, 25 bp, artificial sequence
  antisense probe sequence
agtaactctgctgaagatccattta

SEQ ID NO: 1453 - DNA, 25 bp, artificial sequence
  antisense probe sequence
ttattgcaattcatgctgaatctaa

SEQ ID NO: 1454 - DNA, 25 bp, artificial sequence
  antisense probe sequence
tgagctacaggactcccgagtgtga

SEQ ID NO: 1455 - DNA, 25 bp, artificial sequence
  antisense probe sequence
tggattctgccattgcgacacattt

SEQ ID NO: 1456 - DNA, 25 bp, artificial sequence
  antisense probe sequence
gcgacacatttttgtgcctttcagc

SEQ ID NO: 1457 - DNA, 25 bp, artificial sequence
  antisense probe sequence
agcccctggtgtctgcagtggggga

SEQ ID NO: 1458 - DNA, 25 bp, artificial sequence
  antisense probe sequence
cagtgggggatttaaggcacccgct

SEQ ID NO: 1459 - DNA, 25 bp, artificial sequence
  antisense probe sequence
gcttccacttctttcttgtttggag

SEQ ID NO: 1460 - DNA, 25 bp, artificial sequence
  antisense probe sequence
ttggagttttctgttggaaccgccg

SEQ ID NO: 1461 - DNA, 25 bp, artificial sequence
  antisense probe sequence
ggctccgaagacttagcgacgccac

SEQ ID NO: 1462 - DNA, 25 bp, artificial sequence
  antisense probe sequence
ctgtacacagccgagcagcatttcc

SEQ ID NO: 1463 - DNA, 25 bp, artificial sequence
  antisense probe sequence
tccgttgaaggacttgcatccccat

SEQ ID NO: 1464 - DNA, 25 bp, artificial sequence
  antisense probe sequence
caccgtgcaggttgtggccggtttt

SEQ ID NO: 1465 - DNA, 25 bp, artificial sequence
  antisense probe sequence
ctggcctctactacgtggacagtga

SEQ ID NO: 1466 - DNA, 25 bp, artificial sequence
  antisense probe sequence
taggttctggctctgtgtatgcata

SEQ ID NO: 1467 - DNA, 25 bp, artificial sequence
  antisense probe sequence
tggatcggggctattcctatgacct

SEQ ID NO: 1468 - DNA, 25 bp, artificial sequence
  antisense probe sequence
ggagcaggcctatgatctggcccgt

SEQ ID NO: 1469 - DNA, 25 bp, artificial sequence
  antisense probe sequence
aggaggtgcagtcaacctctaccac

SEQ ID NO: 1470 - DNA, 25 bp, artificial sequence
  antisense probe sequence
ggaggatggctggatccgagtctcc

SEQ ID NO: 1471 - DNA, 25 bp, artificial sequence
  antisense probe sequence
tgagaagtatagtggctctaccccc

SEQ ID NO: 1472 - DNA, 25 bp, artificial sequence
  antisense probe sequence
gtgtttcttggggtgactgtcattg

SEQ ID NO: 1473 - DNA, 25 bp, artificial sequence
  antisense probe sequence
taatacggacacagtgacccatcct

SEQ ID NO: 1474 - DNA, 25 bp, artificial sequence
  antisense probe sequence
gaagggccttcaattgtatcagtac

SEQ ID NO: 1475 - DNA, 25 bp, artificial sequence
  antisense probe sequence
taagctctggcacattgacctctat

SEQ ID NO: 1476 - DNA, 25 bp, artificial sequence
  antisense probe sequence
cgatcaccaatgtacctccagaggt

SEQ ID NO: 1477 - DNA, 25 bp, artificial sequence
  antisense probe sequence
gatcaccaatgtacctccagaggta

SEQ ID NO: 1478 - DNA, 25 bp, artificial sequence
  antisense probe sequence
cctccagaggtaactgtgctcacga

SEQ ID NO: 1479 - DNA, 25 bp, artificial sequence
  antisense probe sequence
tccagaggtaactgtgctcacgaac

SEQ ID NO: 1480 - DNA, 25 bp, artificial sequence
  antisense probe sequence
aggtaactgtgctcacgaacagccc

SEQ ID NO: 1481 - DNA, 25 bp, artificial sequence
  antisense probe sequence
tgctcacgaacagccctgtggaact

SEQ ID NO: 1482 - DNA, 25 bp, artificial sequence
  antisense probe sequence
tggaactgagagagcccaacgtcct

SEQ ID NO: 1483 - DNA, 25 bp, artificial sequence
  antisense probe sequence
caacgtcctcatctgtttcatagac

SEQ ID NO: 1484 - DNA, 25 bp, artificial sequence
  antisense probe sequence
acgtcctcatctgtttcatagacaa

SEQ ID NO: 1485 - DNA, 25 bp, artificial sequence
  antisense probe sequence
gtcctcatctgtttcatagacaagt

SEQ ID NO: 1486 - DNA, 25 bp, artificial sequence
  antisense probe sequence
ctgtttcatagacaagttcacccca

SEQ ID NO: 1487 - DNA, 25 bp, artificial sequence
  antisense probe sequence
agcgacttcttctgaggaggttcct

SEQ ID NO: 1488 - DNA, 25 bp, artificial sequence
  antisense probe sequence
cccacaatgcagtcctggtggcctg

SEQ ID NO: 1489 - DNA, 25 bp, artificial sequence
  antisense probe sequence
tggtggcctgactgtaacacccaac

SEQ ID NO: 1490 - DNA, 25 bp, artificial sequence
  antisense probe sequence
ccagcccggacaatatacaccacga

SEQ ID NO: 1491 - DNA, 25 bp, artificial sequence
  antisense probe sequence
gaggatctccttgacaacctttaat

SEQ ID NO: 1492 - DNA, 25 bp, artificial sequence
  antisense probe sequence
gatggacctgactttcaagaccgag

SEQ ID NO: 1493 - DNA, 25 bp, artificial sequence
  antisense probe sequence
gtggttgtggatttccacgcacagt

SEQ ID NO: 1494 - DNA, 25 bp, artificial sequence
  antisense probe sequence
acagtggtgtggaccctgcaagatc

SEQ ID NO: 1495 - DNA, 25 bp, artificial sequence
  antisense probe sequence
cacacagacctcgccattgagtatg

SEQ ID NO: 1496 - DNA, 25 bp, artificial sequence
  antisense probe sequence
tgagtatgaggtgtcagcggtgccc

SEQ ID NO: 1497 - DNA, 25 bp, artificial sequence
  antisense probe sequence
tgcccactgtgctggccatgaagaa

SEQ ID NO: 1498 - DNA, 25 bp, artificial sequence
  antisense probe sequence
ggccaccctggagaaatgtgccacg

SEQ ID NO: 1499 - DNA, 25 bp, artificial sequence
  antisense probe sequence
tggagaaatgtgccacgtgctccca

SEQ ID NO: 1500 - DNA, 25 bp, artificial sequence
  antisense probe sequence
gcgggctatggggaaggcctaccac

SEQ ID NO: 1501 - DNA, 25 bp, artificial sequence
  antisense probe sequence
ttcacagtggatgctacgagccaga

SEQ ID NO: 1502 - DNA, 25 bp, artificial sequence
  antisense probe sequence
gctacgagccagatccactgtattg

SEQ ID NO: 1503 - DNA, 25 bp, artificial sequence
  antisense probe sequence
gatccactgtattgaggactttcac

SEQ ID NO: 1504 - DNA, 25 bp, artificial sequence
  antisense probe sequence
ctttcacaggaagtttgccccaaga

SEQ ID NO: 1505 - DNA, 25 bp, artificial sequence
  antisense probe sequence
ccccaagatgctcagtgtgcggtgg

SEQ ID NO: 1506 - DNA, 25 bp, artificial sequence
  antisense probe sequence
gagccaggtcaggaggagactgtga

SEQ ID NO: 1507 - DNA, 25 bp, artificial sequence
  antisense probe sequence
gtgagaattgttgctctggatcgaa

SEQ ID NO: 1508 - DNA, 25 bp, artificial sequence
  antisense probe sequence
tggatcgaagttttcacattggctg

SEQ ID NO: 1509 - DNA, 25 bp, artificial sequence
  antisense probe sequence
cagttgtctggggaggattaccgct

SEQ ID NO: 1510 - DNA, 25 bp, artificial sequence
  antisense probe sequence
ggcgatctgtgctgagtgttggctc

SEQ ID NO: 1511 - DNA, 25 bp, artificial sequence
  antisense probe sequence
tcttcctctactcagttttctatta

SEQ ID NO: 1512 - DNA, 25 bp, artificial sequence
  antisense probe sequence
tactcagttttctattatgcccggc

SEQ ID NO: 1513 - DNA, 25 bp, artificial sequence
  antisense probe sequence
cgctccaacatgtctggggcagtac

SEQ ID NO: 1514 - DNA, 25 bp, artificial sequence
  antisense probe sequence
cagtagagttcttcggctactcctt

SEQ ID NO: 1515 - DNA, 25 bp, artificial sequence
  antisense probe sequence
tactccttactcactggttatgtct

SEQ ID NO: 1516 - DNA, 25 bp, artificial sequence
  antisense probe sequence
tcttccctaaagttcatccggtata

SEQ ID NO: 1517 - DNA, 25 bp, artificial sequence
  antisense probe sequence
gatggactgagttctgtatggcaga

SEQ ID NO: 1518 - DNA, 25 bp, artificial sequence
  antisense probe sequence
ggcagaactattgctgttctctccc

SEQ ID NO: 1519 - DNA, 25 bp, artificial sequence
  antisense probe sequence
agttgcctttagttttggtcctgat

SEQ ID NO: 1520 - DNA, 25 bp, artificial sequence
  antisense probe sequence
gggtcattgtttaagatctggctgg

SEQ ID NO: 1521 - DNA, 25 bp, artificial sequence
  antisense probe sequence
atctggctggtggtacctagcctgc

SEQ ID NO: 1522 - DNA, 25 bp, artificial sequence
  antisense probe sequence
gtacctagcctgctggaactggcat

SEQ ID NO: 1523 - DNA, 25 bp, artificial sequence
  antisense probe sequence
tgcaccttggactcacacagggact

SEQ ID NO: 1524 - DNA, 25 bp, artificial sequence
  antisense probe sequence
cacagggactcatcgaacgcttgaa

SEQ ID NO: 1525 - DNA, 25 bp, artificial sequence
  antisense probe sequence
gagactcctttatttatgggcagtg

SEQ ID NO: 1526 - DNA, 25 bp, artificial sequence
  antisense probe sequence
gattggttaccctgatcaaggcctt

SEQ ID NO: 1527 - DNA, 25 bp, artificial sequence
  antisense probe sequence
gtttatggacatctcactttcccac

SEQ ID NO: 1528 - DNA, 25 bp, artificial sequence
  antisense probe sequence
tcctgacccattacatgcacatgta

SEQ ID NO: 1529 - DNA, 25 bp, artificial sequence
  antisense probe sequence
catgcacatgtactcacatactccc

SEQ ID NO: 1530 - DNA, 25 bp, artificial sequence
  antisense probe sequence
ccctcttccttctcgatggagttaa

SEQ ID NO: 1531 - DNA, 25 bp, artificial sequence
  antisense probe sequence
tcgggccagtgaccatgacggggcc

SEQ ID NO: 1532 - DNA, 25 bp, artificial sequence
  antisense probe sequence
gggacagggaatgctgaggcctcga

SEQ ID NO: 1533 - DNA, 25 bp, artificial sequence
  antisense probe sequence
aagagactgatcatccaggcctcag

SEQ ID NO: 1534 - DNA, 25 bp, artificial sequence
  antisense probe sequence
ctgtccaggatggagggtccaatcc

SEQ ID NO: 1535 - DNA, 25 bp, artificial sequence
  antisense probe sequence
gggtccaatcctaggacagccttgt

SEQ ID NO: 1536 - DNA, 25 bp, artificial sequence
  antisense probe sequence
tcagcacccctagcatgaacttgtg

SEQ ID NO: 1537 - DNA, 25 bp, artificial sequence
  antisense probe sequence
gatggacaaaggcctggcgtcggcc

SEQ ID NO: 1538 - DNA, 25 bp, artificial sequence
  antisense probe sequence
cagtgggcaggggtagctagcgtgt

SEQ ID NO: 1539 - DNA, 25 bp, artificial sequence
  antisense probe sequence
gctagcgtgtgccaggcagatcctc

SEQ ID NO: 1540 - DNA, 25 bp, artificial sequence
  antisense probe sequence
cagatcctctggacacgtaacctat

SEQ ID NO: 1541 - DNA, 25 bp, artificial sequence
  antisense probe sequence
acacgtaacctatgtcagacactac

SEQ ID NO: 1542 - DNA, 25 bp, artificial sequence
  antisense probe sequence
gtgagactgaattcttgcaatgcat

SEQ ID NO: 1543 - DNA, 25 bp, artificial sequence
  antisense probe sequence
atgactcactcatttcttggggtcg

SEQ ID NO: 1544 - DNA, 25 bp, artificial sequence
  antisense probe sequence
tcactcatttcttggggtcgtattc

SEQ ID NO: 1545 - DNA, 25 bp, artificial sequence
  antisense probe sequence
ttggggtcgtattcctgatttcaga

SEQ ID NO: 1546 - DNA, 25 bp, artificial sequence
  antisense probe sequence
aagacaatataatcatgtgctttta

SEQ ID NO: 1547 - DNA, 25 bp, artificial sequence
  antisense probe sequence
attatattttagtcccaagaagaca

SEQ ID NO: 1548 - DNA, 25 bp, artificial sequence
  antisense probe sequence
gaagacaaagtcgcagattaacaac

SEQ ID NO: 1549 - DNA, 25 bp, artificial sequence
  antisense probe sequence
agtcgcagattaacaacactttaaa

SEQ ID NO: 1550 - DNA, 25 bp, artificial sequence
  antisense probe sequence
actcccattttattgtgttagattg

SEQ ID NO: 1551 - DNA, 25 bp, artificial sequence
  antisense probe sequence
gatcttaactttcttgactgattta

SEQ ID NO: 1552 - DNA, 25 bp, artificial sequence
  antisense probe sequence
tcctctgggaaagcaatttctatct

SEQ ID NO: 1553 - DNA, 25 bp, artificial sequence
  antisense probe sequence
gaattgcaaaactgacatcccattt

SEQ ID NO: 1554 - DNA, 25 bp, artificial sequence
  antisense probe sequence
actgacatcccatttcacagcaata

SEQ ID NO: 1555 - DNA, 25 bp, artificial sequence
  antisense probe sequence
cacagcaatagtgacctttatttaa

SEQ ID NO: 1556 - DNA, 25 bp, artificial sequence
  antisense probe sequence
gttgtgttatagtttatgcttctta

SEQ ID NO: 1557 - DNA, 25 bp, artificial sequence
  antisense probe sequence
tttcaacctaaacagccaatttcta

SEQ ID NO: 1558 - DNA, 25 bp, artificial sequence
  antisense probe sequence
acagccaatttctaagcagacagga

SEQ ID NO: 1559 - DNA, 25 bp, artificial sequence
  antisense probe sequence
tattttctagattatccctgtgaat

SEQ ID NO: 1560 - DNA, 25 bp, artificial sequence
  antisense probe sequence
aaatcttaggtttgcttatgcccag

SEQ ID NO: 1561 - DNA, 25 bp, artificial sequence
  antisense probe sequence
gctgtttctcacatctatagtgaca

SEQ ID NO: 1562 - DNA, 25 bp, artificial sequence
  antisense probe sequence
ataggaggggttaaggttcatgaga

SEQ ID NO: 1563 - DNA, 25 bp, artificial sequence
  antisense probe sequence
ggtctgagatgggtgctgcaaagat

SEQ ID NO: 1564 - DNA, 25 bp, artificial sequence
  antisense probe sequence
gcatccaagcatgatgagccctctc

SEQ ID NO: 1565 - DNA, 25 bp, artificial sequence
  antisense probe sequence
catccaagcatgatgagccctctca

SEQ ID NO: 1566 - DNA, 25 bp, artificial sequence
  antisense probe sequence
agccctctcacggtgcaatggagtg

SEQ ID NO: 1567 - DNA, 25 bp, artificial sequence
  antisense probe sequence
gccctctcacggtgcaatggagtgc

SEQ ID NO: 1568 - DNA, 25 bp, artificial sequence
  antisense probe sequence
ccctctcacggtgcaatggagtgca

SEQ ID NO: 1569 - DNA, 25 bp, artificial sequence
  antisense probe sequence
gcaatggagtgcacggtctgaatct

SEQ ID NO: 1570 - DNA, 25 bp, artificial sequence
  antisense probe sequence
agccaacaggactcttgagctgaag

SEQ ID NO: 1571 - DNA, 25 bp, artificial sequence
  antisense probe sequence
ccccttgtgccacacattgcattat

SEQ ID NO: 1572 - DNA, 25 bp, artificial sequence
  antisense probe sequence
cccttgtgccacacattgcattatt

SEQ ID NO: 1573 - DNA, 25 bp, artificial sequence
  antisense probe sequence
cttgtgccacacattgcattattaa

SEQ ID NO: 1574 - DNA, 25 bp, artificial sequence
  antisense probe sequence
gtgccacacattgcattattaaatg

SEQ ID NO: 1575 - DNA, 25 bp, artificial sequence
  antisense probe sequence
tagtctaattgaatcccttaaactc

SEQ ID NO: 1576 - DNA, 25 bp, artificial sequence
  antisense probe sequence
atgggatgatcgtgtatttattttt

SEQ ID NO: 1577 - DNA, 25 bp, artificial sequence
  antisense probe sequence
ttttttacttcctcagctgtagaca

SEQ ID NO: 1578 - DNA, 25 bp, artificial sequence
  antisense probe sequence
acttcctcagctgtagacaggtcct

SEQ ID NO: 1579 - DNA, 25 bp, artificial sequence
  antisense probe sequence
gacaggtccttttcgatggtacata

SEQ ID NO: 1580 - DNA, 25 bp, artificial sequence
  antisense probe sequence
tggtacatatttctttgcctttata

SEQ ID NO: 1581 - DNA, 25 bp, artificial sequence
  antisense probe sequence
tataatcttttatacagtgtcttac

SEQ ID NO: 1582 - DNA, 25 bp, artificial sequence
  antisense probe sequence
gtgatgtggcaaatctctattagga

SEQ ID NO: 1583 - DNA, 25 bp, artificial sequence
  antisense probe sequence
atattctgtaatcttcagacctaga

SEQ ID NO: 1584 - DNA, 25 bp, artificial sequence
  antisense probe sequence
aggtttgtgactttcctaaatcaat

SEQ ID NO: 1585 - DNA, 25 bp, artificial sequence
  antisense probe sequence
tacgtgcaatacttcaatacttcat

SEQ ID NO: 1586 - DNA, 25 bp, artificial sequence
  antisense probe sequence
aatgactgcaaaagtgccacggata

SEQ ID NO: 1587 - DNA, 25 bp, artificial sequence
  antisense probe sequence
agtgccacggatatcaatttgaggg

SEQ ID NO: 1588 - DNA, 25 bp, artificial sequence
  antisense probe sequence
gaggatcaactgtaccatatttaat

SEQ ID NO: 1589 - DNA, 25 bp, artificial sequence
  antisense probe sequence
aaggaatcttcctagatatgataaa

SEQ ID NO: 1590 - DNA, 25 bp, artificial sequence
  antisense probe sequence
gcccacacctaacattatacttcat

SEQ ID NO: 1591 - DNA, 25 bp, artificial sequence
  antisense probe sequence
gactgaaggctgaatgttttcccct

SEQ ID NO: 1592 - DNA, 25 bp, artificial sequence
  antisense probe sequence
aggacaaggatgttcactcggcact

SEQ ID NO: 1593 - DNA, 25 bp, artificial sequence
  antisense probe sequence
tcggcactacttctattcagcattg

SEQ ID NO: 1594 - DNA, 25 bp, artificial sequence
  antisense probe sequence
tacttctattcagcattgtacttga

SEQ ID NO: 1595 - DNA, 25 bp, artificial sequence
  antisense probe sequence
tctagccacagcagttaggttagga

SEQ ID NO: 1596 - DNA, 25 bp, artificial sequence
  antisense probe sequence
taggaattcaaggtttgttcaacat

SEQ ID NO: 1597 - DNA, 25 bp, artificial sequence
  antisense probe sequence
agtcaagtgaccagcctctgactgt

SEQ ID NO: 1598 - DNA, 25 bp, artificial sequence
  antisense probe sequence
actcgattccactgctaaactcagc

SEQ ID NO: 1599 - DNA, 25 bp, artificial sequence
  antisense probe sequence
tcagctgtgagctgcggataccgcc

SEQ ID NO: 1600 - DNA, 25 bp, artificial sequence
  antisense probe sequence
acctgctcttaacctcaaacctagg

SEQ ID NO: 1601 - DNA, 25 bp, artificial sequence
  antisense probe sequence
ctaggaccgtcttgctttgtcattg

SEQ ID NO: 1602 - DNA, 25 bp, artificial sequence
  antisense probe sequence
ggagagaacccatttctccagactt

SEQ ID NO: 1603 - DNA, 25 bp, artificial sequence
  antisense probe sequence
ttacctacccgtgcctgagaaagca

SEQ ID NO: 1604 - DNA, 25 bp, artificial sequence
  antisense probe sequence
gcatacttgacaactgtggactcca

SEQ ID NO: 1605 - DNA, 25 bp, artificial sequence
  antisense probe sequence
tacttcctttaaaccatcagccggc

SEQ ID NO: 1606 - DNA, 25 bp, artificial sequence
  antisense probe sequence
gccttttatatgggtcttcactctg

SEQ ID NO: 1607 - DNA, 25 bp, artificial sequence
  antisense probe sequence
gtgtaatctctattgctattgcccc

SEQ ID NO: 1608 - DNA, 25 bp, artificial sequence
  antisense probe sequence
acagcaagcctatgtagttcaatta

SEQ ID NO: 1609 - DNA, 25 bp, artificial sequence
  antisense probe sequence
gtgtttctagcatgaatgttctata

SEQ ID NO: 1610 - DNA, 25 bp, artificial sequence
  antisense probe sequence
gacaaatgctactcacagtacaatc

SEQ ID NO: 1611 - DNA, 25 bp, artificial sequence
  antisense probe sequence
ggtgttcttcagagacattttatct

SEQ ID NO: 1612 - DNA, 25 bp, artificial sequence
  antisense probe sequence
aaattttcctactattatgttcatt

SEQ ID NO: 1613 - DNA, 25 bp, artificial sequence
  antisense probe sequence
aacaaacttctttatcacatgtatc

SEQ ID NO: 1614 - DNA, 25 bp, artificial sequence
  antisense probe sequence
gtatcttctacgtgtaaaacatttc

SEQ ID NO: 1615 - DNA, 25 bp, artificial sequence
  antisense probe sequence
atgaatttcttcatttgctcttgca

SEQ ID NO: 1616 - DNA, 25 bp, artificial sequence
  antisense probe sequence
ttgctcttgcatctacattgctata

SEQ ID NO: 1617 - DNA, 25 bp, artificial sequence
  antisense probe sequence
atgttttttccttacaatgtgaact

SEQ ID NO: 1618 - DNA, 25 bp, artificial sequence
  antisense probe sequence
caatgtgaactcatcgtgatcttgg

SEQ ID NO: 1619 - DNA, 25 bp, artificial sequence
  antisense probe sequence
gattgagtcatcgacattcaggatt

SEQ ID NO: 1620 - DNA, 25 bp, artificial sequence
  antisense probe sequence
aggatttaagtctgaggtagtcaac

SEQ ID NO: 1621 - DNA, 25 bp, artificial sequence
  antisense probe sequence
aaaaatggcttatctgaaatcagta

SEQ ID NO: 1622 - DNA, 25 bp, artificial sequence
  antisense probe sequence
atgcttctggaattgagttctcctt

SEQ ID NO: 1623 - DNA, 25 bp, artificial sequence
  antisense probe sequence
gagttctccttttaagtaccaatga

SEQ ID NO: 1624 - DNA, 25 bp, artificial sequence
  antisense probe sequence
tgtaatggtgtgtcattgccttgaa

SEQ ID NO: 1625 - DNA, 25 bp, artificial sequence
  antisense probe sequence
gtgtcattgccttgaaatgcttgct

SEQ ID NO: 1626 - DNA, 25 bp, artificial sequence
  antisense probe sequence
tgaaatgcttgcttagggcttcttt

SEQ ID NO: 1627 - DNA, 25 bp, artificial sequence
  antisense probe sequence
aaaagtctagattggtcttgatatt

SEQ ID NO: 1628 - DNA, 25 bp, artificial sequence
  antisense probe sequence
caatcttcattctacagatgaactc

SEQ ID NO: 1629 - DNA, 25 bp, artificial sequence
  antisense probe sequence
gcgtgcgtttcagtgtttaagaagg

SEQ ID NO: 1630 - DNA, 25 bp, artificial sequence
  antisense probe sequence
aatgggtttaatgaggtctaccttg

SEQ ID NO: 1631 - DNA, 25 bp, artificial sequence
  antisense probe sequence
cttgcagagccattgtgagcattgg

SEQ ID NO: 1632 - DNA, 25 bp, artificial sequence
  antisense probe sequence
gaatcataccagaacgtctagtata

SEQ ID NO: 1633 - DNA, 25 bp, artificial sequence
  antisense probe sequence
cactaggcaattctgtcattgtgta

SEQ ID NO: 1634 - DNA, 25 bp, artificial sequence
  antisense probe sequence
tactgaatgtcagtcatttccccta

SEQ ID NO: 1635 - DNA, 25 bp, artificial sequence
  antisense probe sequence
gcaatgccaatatcaagggccatgt

SEQ ID NO: 1636 - DNA, 25 bp, artificial sequence
  antisense probe sequence
aagggccatgtatcaggtttctgta

SEQ ID NO: 1637 - DNA, 25 bp, artificial sequence
  antisense probe sequence
caggtttctgtatatgttccactat

SEQ ID NO: 1638 - DNA, 25 bp, artificial sequence
  antisense probe sequence
gtagcatatggctgtgtatcactag

SEQ ID NO: 1639 - DNA, 25 bp, artificial sequence
  antisense probe sequence
tatgtagatccaatcactttaccta

SEQ ID NO: 1640 - DNA, 25 bp, artificial sequence
  antisense probe sequence
aaatgactgctatggtgggaacaca

SEQ ID NO: 1641 - DNA, 25 bp, artificial sequence
  antisense probe sequence
gcgtaagagggctctggtcttccaa

SEQ ID NO: 1642 - DNA, 25 bp, artificial sequence
  antisense probe sequence
tttgagcatcgaatccccaaggaac

SEQ ID NO: 1643 - DNA, 25 bp, artificial sequence
  antisense probe sequence
aactgaggcccatcctcaaaatcct

SEQ ID NO: 1644 - DNA, 25 bp, artificial sequence
  antisense probe sequence
tgacttggacacttcagaccatgcc

SEQ ID NO: 1645 - DNA, 25 bp, artificial sequence
  antisense probe sequence
tgccgtctaaacctctctggagtga

SEQ ID NO: 1646 - DNA, 25 bp, artificial sequence
  antisense probe sequence
agctcacaccctaataagtccacat

SEQ ID NO: 1647 - DNA, 25 bp, artificial sequence
  antisense probe sequence
aagtccacatcttctcagtgtttta

SEQ ID NO: 1648 - DNA, 25 bp, artificial sequence
  antisense probe sequence
tattctgtaccttgcagccatgacc

SEQ ID NO: 1649 - DNA, 25 bp, artificial sequence
  antisense probe sequence
cccagctttatctgtcacacaaggc

SEQ ID NO: 1650 - DNA, 25 bp, artificial sequence
  antisense probe sequence
gctactgctagatatcacttactca

SEQ ID NO: 1651 - DNA, 25 bp, artificial sequence
  antisense probe sequence
aagagtcttggttcctctactactt

SEQ ID NO: 1652 - DNA, 25 bp, artificial sequence
  antisense probe sequence
cagaaacctcgatatataattgtat

SEQ ID NO: 1653 - DNA, 25 bp, artificial sequence
  antisense probe sequence
ttattttttacatctatggtagttt

SEQ ID NO: 1654 - DNA, 25 bp, artificial sequence
  antisense probe sequence
atggtagtttttgaggtgcctatta

SEQ ID NO: 1655 - DNA, 25 bp, artificial sequence
  antisense probe sequence
taaagtattacggaagtttgctgtt

SEQ ID NO: 1656 - DNA, 25 bp, artificial sequence
  antisense probe sequence
gatttattaagttgtagtcaccata

SEQ ID NO: 1657 - DNA, 25 bp, artificial sequence
  antisense probe sequence
gtagtcaccatagtgatagcccata

SEQ ID NO: 1658 - DNA, 25 bp, artificial sequence
  antisense probe sequence
gatagcccataaataattgctggaa

SEQ ID NO: 1659 - DNA, 25 bp, artificial sequence
  antisense probe sequence
gattcagaatgataacctcttttag

SEQ ID NO: 1660 - DNA, 25 bp, artificial sequence
  antisense probe sequence
gaaatgctatactgtcctgcttgta

SEQ ID NO: 1661 - DNA, 25 bp, artificial sequence
  antisense probe sequence
actgtcctgcttgtacaacatggtt

SEQ ID NO: 1662 - DNA, 25 bp, artificial sequence
  antisense probe sequence
gtacaacatggtttggggtgaaggg

SEQ ID NO: 1663 - DNA, 25 bp, artificial sequence
  antisense probe sequence
aaggcttggatgcgtgtgtaataga

SEQ ID NO: 1664 - DNA, 25 bp, artificial sequence
  antisense probe sequence
atagagccttatggtgtgtgcgcac

SEQ ID NO: 1665 - DNA, 25 bp, artificial sequence
  antisense probe sequence
tattggacacgtaacctggctctaa

SEQ ID NO: 1666 - DNA, 25 bp, artificial sequence
  antisense probe sequence
acctggctctaatttgggctgtttt

SEQ ID NO: 1667 - DNA, 25 bp, artificial sequence
  antisense probe sequence
gatacactgtgataagttcttttac

SEQ ID NO: 1668 - DNA, 25 bp, artificial sequence
  antisense probe sequence
aaacttttggttttcagatatgctt

SEQ ID NO: 1669 - DNA, 25 bp, artificial sequence
  antisense probe sequence
gatatgcttaatgatagtcttacta

SEQ ID NO: 1670 - DNA, 25 bp, artificial sequence
  antisense probe sequence
gctgcaacaggtttgttctcaggag

SEQ ID NO: 1671 - DNA, 25 bp, artificial sequence
  antisense probe sequence
gaccaataacctaattgtctattcc

SEQ ID NO: 1672 - DNA, 25 bp, artificial sequence
  antisense probe sequence
tccccatccttattagctctactgg

SEQ ID NO: 1673 - DNA, 25 bp, artificial sequence
  antisense probe sequence
aaccagatcatgttcctttttttgt

SEQ ID NO: 1674 - DNA, 25 bp, artificial sequence
  antisense probe sequence
ggtgctgccctgtgtacatataaat

SEQ ID NO: 1675 - DNA, 25 bp, artificial sequence
  antisense probe sequence
ggtgttggggaaaccttcatctgaa

SEQ ID NO: 1676 - DNA, 25 bp, artificial sequence
  antisense probe sequence
agactctgagctgctcaccggagtc

SEQ ID NO: 1677 - DNA, 25 bp, artificial sequence
  antisense probe sequence
gctgctcaccggagtcattgggaag

SEQ ID NO: 1678 - DNA, 25 bp, artificial sequence
  antisense probe sequence
ctagagtctcagaaactcccctggg

SEQ ID NO: 1679 - DNA, 25 bp, artificial sequence
  antisense probe sequence
ggaggaattcagctcagcttcttcc

SEQ ID NO: 1680 - DNA, 25 bp, artificial sequence
  antisense probe sequence
acaagagtttgttctgttctggggg

SEQ ID NO: 1681 - DNA, 25 bp, artificial sequence
  antisense probe sequence
tctgggggacagagaaggcgcttcc

SEQ ID NO: 1682 - DNA, 25 bp, artificial sequence
  antisense probe sequence
gcttcccaacttcatactggcagga

SEQ ID NO: 1683 - DNA, 25 bp, artificial sequence
  antisense probe sequence
ggtgaggaggttcactgagctcccc

SEQ ID NO: 1684 - DNA, 25 bp, artificial sequence
  antisense probe sequence
cccactgcggggagacagaagcctg

SEQ ID NO: 1685 - DNA, 25 bp, artificial sequence
  antisense probe sequence
gaaaatattcctgacgtggtcccgg

SEQ ID NO: 1686 - DNA, 25 bp, artificial sequence
  antisense probe sequence
gcagccatctgactccaatagagag

SEQ ID NO: 1687 - DNA, 25 bp, artificial sequence
  antisense probe sequence
gagagagagttcttcacctttaagt

SEQ ID NO: 1688 - DNA, 25 bp, artificial sequence
  antisense probe sequence
gtaaccagtctgaacctggcagcat

SEQ ID NO: 1689 - DNA, 25 bp, artificial sequence
  antisense probe sequence
ggcagcatcgctttaaactcgtatc

SEQ ID NO: 1690 - DNA, 25 bp, artificial sequence
  antisense probe sequence
aaactcgtatcactccagaaattgt

SEQ ID NO: 1691 - DNA, 25 bp, artificial sequence
  antisense probe sequence
tttgatactgattccagctgtctgg

SEQ ID NO: 1692 - DNA, 25 bp, artificial sequence
  antisense probe sequence
gaatcacatagctccttatctgact

SEQ ID NO: 1693 - DNA, 25 bp, artificial sequence
  antisense probe sequence
ttatctgactcagaatttcccccaa

SEQ ID NO: 1694 - DNA, 25 bp, artificial sequence
  antisense probe sequence
gaaggacaagagctcataaccgtaa

SEQ ID NO: 1695 - DNA, 25 bp, artificial sequence
  antisense probe sequence
acatgtgctagtggatctacttgtg

SEQ ID NO: 1696 - DNA, 25 bp, artificial sequence
  antisense probe sequence
tcagccctgatgcacaggctgccag

SEQ ID NO: 1697 - DNA, 25 bp, artificial sequence
  antisense probe sequence
actggtgccttgcttagagccagaa

SEQ ID NO: 1698 - DNA, 25 bp, artificial sequence
  antisense probe sequence
gccagaagggatgaagccgggggat

SEQ ID NO: 1699 - DNA, 25 bp, artificial sequence
  antisense probe sequence
gaagccgggggatctatggaacaga

SEQ ID NO: 1700 - DNA, 25 bp, artificial sequence
  antisense probe sequence
gaggaggagcgatgcagttgggaga

SEQ ID NO: 1701 - DNA, 25 bp, artificial sequence
  antisense probe sequence
ggaagctagaagggttatggttgga

SEQ ID NO: 1702 - DNA, 25 bp, artificial sequence
  antisense probe sequence
cagaggggaagggccctgtggtgcc

SEQ ID NO: 1703 - DNA, 25 bp, artificial sequence
  antisense probe sequence
ttccttcagcctccgaagggtgatg

SEQ ID NO: 1704 - DNA, 25 bp, artificial sequence
  antisense probe sequence
gcattgagcccttggttgcctgggc

SEQ ID NO: 1705 - DNA, 25 bp, artificial sequence
  antisense probe sequence
gggggttttcagtatttgtaagcat

SEQ ID NO: 1706 - DNA, 25 bp, artificial sequence
  antisense probe sequence
gtatttgtaagcatttcagcagaac

SEQ ID NO: 1707 - DNA, 25 bp, artificial sequence
  antisense probe sequence
tggagtgtgttcctgaagagcagcc

SEQ ID NO: 1708 - DNA, 25 bp, artificial sequence
  antisense probe sequence
gaggcaggcataggcagggaaccga

SEQ ID NO: 1709 - DNA, 25 bp, artificial sequence
  antisense probe sequence
gggaaccgagcagcaggtcagagca

SEQ ID NO: 1710 - DNA, 25 bp, artificial sequence
  antisense probe sequence
aggcgagctgacattctgcagcctg

SEQ ID NO: 1711 - DNA, 25 bp, artificial sequence
  antisense probe sequence
gcctggacggccatggcaggaagct

SEQ ID NO: 1712 - DNA, 25 bp, artificial sequence
  antisense probe sequence
aagcctcctagggttctgagcagaa

SEQ ID NO: 1713 - DNA, 25 bp, artificial sequence
  antisense probe sequence
ggggcatgagctgattcacattctg

SEQ ID NO: 1714 - DNA, 25 bp, artificial sequence
  antisense probe sequence
acattctgaaggacctctctagctg

SEQ ID NO: 1715 - DNA, 25 bp, artificial sequence
  antisense probe sequence
aaagcagagagaccagtgcagggct

SEQ ID NO: 1716 - DNA, 25 bp, artificial sequence
  antisense probe sequence
gttgcaggcgagagactggggtgct

SEQ ID NO: 1717 - DNA, 25 bp, artificial sequence
  antisense probe sequence
tctcccaagagacaaaggccattgc

SEQ ID NO: 1718 - DNA, 25 bp, artificial sequence
  antisense probe sequence
aaatcgtggcaaaatcttccctcca

SEQ ID NO: 1719 - DNA, 25 bp, artificial sequence
  antisense probe sequence
gactttaggggacttacttctcacg

SEQ ID NO: 1720 - DNA, 25 bp, artificial sequence
  antisense probe sequence
gaatctacagccattcactgttacc

SEQ ID NO: 1721 - DNA, 25 bp, artificial sequence
  antisense probe sequence
cactgttacctgtcctacgttcagg

SEQ ID NO: 1722 - DNA, 25 bp, artificial sequence
  antisense probe sequence
aagcctttgcccatattactggtgg

SEQ ID NO: 1723 - DNA, 25 bp, artificial sequence
  antisense probe sequence
actagagaacatccccagagtcctc

SEQ ID NO: 1724 - DNA, 25 bp, artificial sequence
  antisense probe sequence
gacctggaggatccccagggtcttc

SEQ ID NO: 1725 - DNA, 25 bp, artificial sequence
  antisense probe sequence
cagcaggaaggacacctctctgagg

SEQ ID NO: 1726 - DNA, 25 bp, artificial sequence
  antisense probe sequence
gtggttgcacgagctgaaggttccc

SEQ ID NO: 1727 - DNA, 25 bp, artificial sequence
  antisense probe sequence
gaaggttccccacgtgtgaaagtca

SEQ ID NO: 1728 - DNA, 25 bp, artificial sequence
  antisense probe sequence
gaatggctccctgacaaatcatttc

SEQ ID NO: 1729 - DNA, 25 bp, artificial sequence
  antisense probe sequence
ggtggccgagagtaaatgtggggac

SEQ ID NO: 1730 - DNA, 25 bp, artificial sequence
  antisense probe sequence
gtaaatgtggggacctagaggagga

SEQ ID NO: 1731 - DNA, 25 bp, artificial sequence
  antisense probe sequence
tggaggcccaggcggacaagtattc

SEQ ID NO: 1732 - DNA, 25 bp, artificial sequence
  antisense probe sequence
caggcggacaagtattccaccaaag

SEQ ID NO: 1733 - DNA, 25 bp, artificial sequence
  antisense probe sequence
gatgaagtctatgcccagaagatga

SEQ ID NO: 1734 - DNA, 25 bp, artificial sequence
  antisense probe sequence
aggaactggacaacgcactcaatga

SEQ ID NO: 1735 - DNA, 25 bp, artificial sequence
  antisense probe sequence
gacaacgcactcaatgacatcacct

SEQ ID NO: 1736 - DNA, 25 bp, artificial sequence
  antisense probe sequence
tcctttccattctctctatggggag

SEQ ID NO: 1737 - DNA, 25 bp, artificial sequence
  antisense probe sequence
gaggagcagaaattgccaacattgc

SEQ ID NO: 1738 - DNA, 25 bp, artificial sequence
  antisense probe sequence
ttgccaacattgcacagccaggctg

SEQ ID NO: 1739 - DNA, 25 bp, artificial sequence
  antisense probe sequence
ctgggagcagcctagggagagcccc

SEQ ID NO: 1740 - DNA, 25 bp, artificial sequence
  antisense probe sequence
accaatgaggttcctgaggtcacag

SEQ ID NO: 1741 - DNA, 25 bp, artificial sequence
  antisense probe sequence
atgaggttcctgaggtcacagtgtt

SEQ ID NO: 1742 - DNA, 25 bp, artificial sequence
  antisense probe sequence
aggttcctgaggtcacagtgttttc

SEQ ID NO: 1743 - DNA, 25 bp, artificial sequence
  antisense probe sequence
tcctgaggtcacagtgttttccaag

SEQ ID NO: 1744 - DNA, 25 bp, artificial sequence
  antisense probe sequence
gtcttgtggacaacatctttcctcc

SEQ ID NO: 1745 - DNA, 25 bp, artificial sequence
  antisense probe sequence
ctctccaagagtgatcattccttct

SEQ ID NO: 1746 - DNA, 25 bp, artificial sequence
  antisense probe sequence
ccaagagtgatcattccttcttcaa

SEQ ID NO: 1747 - DNA, 25 bp, artificial sequence
  antisense probe sequence
agagtgatcattccttcttcaagat

SEQ ID NO: 1748 - DNA, 25 bp, artificial sequence
  antisense probe sequence
agtgatcattccttcttcaagatca

SEQ ID NO: 1749 - DNA, 25 bp, artificial sequence
  antisense probe sequence
gatgagatttatgactgcaaggtgg

SEQ ID NO: 1750 - DNA, 25 bp, artificial sequence
  antisense probe sequence
cctcttctgaaacactgggagcctg

SEQ ID NO: 1751 - DNA, 25 bp, artificial sequence
  antisense probe sequence
gactatttcaaagctactgttccta

SEQ ID NO: 1752 - DNA, 25 bp, artificial sequence
  antisense probe sequence
gttcctagtccagctttaagtttcg

SEQ ID NO: 1753 - DNA, 25 bp, artificial sequence
  antisense probe sequence
gctgttttgtttcatgatttcgtta

SEQ ID NO: 1754 - DNA, 25 bp, artificial sequence
  antisense probe sequence
gatgatggtgtcctttagggctctt

SEQ ID NO: 1755 - DNA, 25 bp, artificial sequence
  antisense probe sequence
agggctcttggagcagccagaccat

SEQ ID NO: 1756 - DNA, 25 bp, artificial sequence
  antisense probe sequence
agttgtcctggggctgaatgggcaa

SEQ ID NO: 1757 - DNA, 25 bp, artificial sequence
  antisense probe sequence
gaatgggcaaatctgtccaaacagc

SEQ ID NO: 1758 - DNA, 25 bp, artificial sequence
  antisense probe sequence
gctagtaaccggctgtgagggagag

SEQ ID NO: 1759 - DNA, 25 bp, artificial sequence
  antisense probe sequence
gtcagaagcacttagcgttggcctc

SEQ ID NO: 1760 - DNA, 25 bp, artificial sequence
  antisense probe sequence
atgattttctctaaatgcctgggta

SEQ ID NO: 1761 - DNA, 25 bp, artificial sequence
  antisense probe sequence
ttcaaggagctcacttggcctgctt

SEQ ID NO: 1762 - DNA, 25 bp, artificial sequence
  antisense probe sequence
tcaccgtcacagagtcttaccaaag

SEQ ID NO: 1763 - DNA, 25 bp, artificial sequence
  antisense probe sequence
gtcacagagtcttaccaaagtcagg

SEQ ID NO: 1764 - DNA, 25 bp, artificial sequence
  antisense probe sequence
caaagtcaggacagttcaaataaca

SEQ ID NO: 1765 - DNA, 25 bp, artificial sequence
  antisense probe sequence
aacaatccggagttatgcgtcctct

SEQ ID NO: 1766 - DNA, 25 bp, artificial sequence
  antisense probe sequence
caatccggagttatgcgtcctcttg

SEQ ID NO: 1767 - DNA, 25 bp, artificial sequence
  antisense probe sequence
tccggagttatgcgtcctcttgaaa

SEQ ID NO: 1768 - DNA, 25 bp, artificial sequence
  antisense probe sequence
gttatgcgtcctcttgaaaaagccg

SEQ ID NO: 1769 - DNA, 25 bp, artificial sequence
  antisense probe sequence
gcgtcctcttgaaaaagccgaagac

SEQ ID NO: 1770 - DNA, 25 bp, artificial sequence
  antisense probe sequence
ccatggcgacgaacagctggcactg

SEQ ID NO: 1771 - DNA, 25 bp, artificial sequence
  antisense probe sequence
cgaacagctggcactgagtagcagc

SEQ ID NO: 1772 - DNA, 25 bp, artificial sequence
  antisense probe sequence
acagctggcactgagtagcagctgc

SEQ ID NO: 1773 - DNA, 25 bp, artificial sequence
  antisense probe sequence
tctcctcgtggatcgtgtatcccag

SEQ ID NO: 1774 - DNA, 25 bp, artificial sequence
  antisense probe sequence
tcctcgtggatcgtgtatcccagcg

SEQ ID NO: 1775 - DNA, 25 bp, artificial sequence
  antisense probe sequence
cgtgtatcccagcggcaaggtgtat

SEQ ID NO: 1776 - DNA, 25 bp, artificial sequence
  antisense probe sequence
gtatcccagcggcaaggtgtatgtg

SEQ ID NO: 1777 - DNA, 25 bp, artificial sequence
  antisense probe sequence
ccagcggcaaggtgtatgtggcagc

SEQ ID NO: 1778 - DNA, 25 bp, artificial sequence
  antisense probe sequence
tgtggtgctgacctgtgagctatgc

SEQ ID NO: 1779 - DNA, 25 bp, artificial sequence
  antisense probe sequence
gcagaggtgcgctggaccaaggatg

SEQ ID NO: 1780 - DNA, 25 bp, artificial sequence
  antisense probe sequence
agctcgaggactccggcgagtactt

SEQ ID NO: 1781 - DNA, 25 bp, artificial sequence
  antisense probe sequence
cgaggactccggcgagtacttgtgt

SEQ ID NO: 1782 - DNA, 25 bp, artificial sequence
  antisense probe sequence
gactccggcgagtacttgtgtgaaa

SEQ ID NO: 1783 - DNA, 25 bp, artificial sequence
  antisense probe sequence
aaattgacgatgagtcggcctcctt

SEQ ID NO: 1784 - DNA, 25 bp, artificial sequence
  antisense probe sequence
caaggcatctgttgctttgggtcct

SEQ ID NO: 1785 - DNA, 25 bp, artificial sequence
  antisense probe sequence
tgaccgtgttttcaactgtgtccac

SEQ ID NO: 1786 - DNA, 25 bp, artificial sequence
  antisense probe sequence
tccagattgcaacctggcctgcatc

SEQ ID NO: 1787 - DNA, 25 bp, artificial sequence
  antisense probe sequence
tcctgctcgtgtcttaacctaagtg

SEQ ID NO: 1788 - DNA, 25 bp, artificial sequence
  antisense probe sequence
ctccatgtggtagctcctttggcaa

SEQ ID NO: 1789 - DNA, 25 bp, artificial sequence
  antisense probe sequence
aatgtcctgctgtggcgttttatgt

SEQ ID NO: 1790 - DNA, 25 bp, artificial sequence
  antisense probe sequence
atgtgttgcttggagtctgtggggt

SEQ ID NO: 1791 - DNA, 25 bp, artificial sequence
  antisense probe sequence
tcccgtccccagggcagatttgatt

SEQ ID NO: 1792 - DNA, 25 bp, artificial sequence
  antisense probe sequence
gctgaagttttgtctcttggtccac

SEQ ID NO: 1793 - DNA, 25 bp, artificial sequence
  antisense probe sequence
aatgggtctttcagtcttggcattt

SEQ ID NO: 1794 - DNA, 25 bp, artificial sequence
  antisense probe sequence
gtatattgtgtgtctcatctgtgaa

SEQ ID NO: 1795 - DNA, 25 bp, artificial sequence
  antisense probe sequence
gaggaaaatgaagctcgggctggtt

SEQ ID NO: 1796 - DNA, 25 bp, artificial sequence
  antisense probe sequence
gaagctcgggctggttaactgactt

SEQ ID NO: 1797 - DNA, 25 bp, artificial sequence
  antisense probe sequence
gctcgggctggttaactgacttgct

SEQ ID NO: 1798 - DNA, 25 bp, artificial sequence
  antisense probe sequence
cgggctggttaactgacttgctcag

SEQ ID NO: 1799 - DNA, 25 bp, artificial sequence
  antisense probe sequence
gctggttaactgacttgctcagcgt

SEQ ID NO: 1800 - DNA, 25 bp, artificial sequence
  antisense probe sequence
cgctgtgtctagcagcctctaggat

SEQ ID NO: 1801 - DNA, 25 bp, artificial sequence
  antisense probe sequence
tgtctagcagcctctaggatcttgt

SEQ ID NO: 1802 - DNA, 25 bp, artificial sequence
  antisense probe sequence
cctgatttctgtatacatgtagctt

SEQ ID NO: 1803 - DNA, 25 bp, artificial sequence
  antisense probe sequence
tgtatacatgtagctttgccagata

SEQ ID NO: 1804 - DNA, 25 bp, artificial sequence
  antisense probe sequence
agctttgccagatatgtacttagta

SEQ ID NO: 1805 - DNA, 25 bp, artificial sequence
  antisense probe sequence
tattaataaaatccatttactgtgt

SEQ ID NO: 1806 - DNA, 25 bp, artificial sequence
  antisense probe sequence
acaggtttgatggcacttctcatga

SEQ ID NO: 1807 - DNA, 25 bp, artificial sequence
  antisense probe sequence
ggcacttctcatgatacattttagt

SEQ ID NO: 1808 - DNA, 25 bp, artificial sequence
  antisense probe sequence
aaatcttgagaaccttctactttct

SEQ ID NO: 1809 - DNA, 25 bp, artificial sequence
  antisense probe sequence
gaaagtcagctatgattttgcctat

SEQ ID NO: 1810 - DNA, 25 bp, artificial sequence
  antisense probe sequence
gattttgcctatagttctagttatt

SEQ ID NO: 1811 - DNA, 25 bp, artificial sequence
  antisense probe sequence
gacatacctgtaaattgaacctatt

SEQ ID NO: 1812 - DNA, 25 bp, artificial sequence
  antisense probe sequence
ctgtatgtgtattatggctcttttc

SEQ ID NO: 1813 - DNA, 25 bp, artificial sequence
  antisense probe sequence
atggctcttttcctattagagcaac

SEQ ID NO: 1814 - DNA, 25 bp, artificial sequence
  antisense probe sequence
tagagcaacttgtgtttccctgata

SEQ ID NO: 1815 - DNA, 25 bp, artificial sequence
  antisense probe sequence
gtgtttccctgataatgtgtacatt

SEQ ID NO: 1816 - DNA, 25 bp, artificial sequence
  antisense probe sequence
ctgttttgtaatatctagctctata

SEQ ID NO: 1817 - DNA, 25 bp, artificial sequence
  antisense probe sequence
ctccccaagctcctttaaccaggag

SEQ ID NO: 1818 - DNA, 25 bp, artificial sequence
  antisense probe sequence
gagtgagctacgtcttgggaggatt

SEQ ID NO: 1819 - DNA, 25 bp, artificial sequence
  antisense probe sequence
ggctagagttgctcagatcggctca

SEQ ID NO: 1820 - DNA, 25 bp, artificial sequence
  antisense probe sequence
aaggcccaggggtcaaagcatttgc

SEQ ID NO: 1821 - DNA, 25 bp, artificial sequence
  antisense probe sequence
gcatttgctcaccacaactgagtct

SEQ ID NO: 1822 - DNA, 25 bp, artificial sequence
  antisense probe sequence
cccctcagaaacgccctggtggagg

SEQ ID NO: 1823 - DNA, 25 bp, artificial sequence
  antisense probe sequence
gggaaacttgaagccatcacagcca

SEQ ID NO: 1824 - DNA, 25 bp, artificial sequence
  antisense probe sequence
tcctttgccctcactagggaagccc

SEQ ID NO: 1825 - DNA, 25 bp, artificial sequence
  antisense probe sequence
cggacttgtccccatggagtgaaga

SEQ ID NO: 1826 - DNA, 25 bp, artificial sequence
  antisense probe sequence
gtgaagagaggccccatttttgagt

SEQ ID NO: 1827 - DNA, 25 bp, artificial sequence
  antisense probe sequence
gttgtgtcactggtggtcatgttgc

SEQ ID NO: 1828 - DNA, 25 bp, artificial sequence
  antisense probe sequence
tggagggattgtcctttcaagcacc

SEQ ID NO: 1829 - DNA, 25 bp, artificial sequence
  antisense probe sequence
tcctttcaagcaccacagcttcaga

SEQ ID NO: 1830 - DNA, 25 bp, artificial sequence
  antisense probe sequence
gtactttcaaatattgtccacttta

SEQ ID NO: 1831 - DNA, 25 bp, artificial sequence
  antisense probe sequence
atattggagactcaactgcccttgg

SEQ ID NO: 1832 - DNA, 25 bp, artificial sequence
  antisense probe sequence
aatggcctagtactgtggaatttta

SEQ ID NO: 1833 - DNA, 25 bp, artificial sequence
  antisense probe sequence
aaagaactcacatcccatctgaaac

SEQ ID NO: 1834 - DNA, 25 bp, artificial sequence
  antisense probe sequence
catcccatctgaaacttcccagggg

SEQ ID NO: 1835 - DNA, 25 bp, artificial sequence
  antisense probe sequence
tcccatttttggtatcttgttcagc

SEQ ID NO: 1836 - DNA, 25 bp, artificial sequence
  antisense probe sequence
atttcttgtctgcagaacatcctat

SEQ ID NO: 1837 - DNA, 25 bp, artificial sequence
  antisense probe sequence
aagaccaccacatagaatacccctt

SEQ ID NO: 1838 - DNA, 25 bp, artificial sequence
  antisense probe sequence
cagctcgctctgatttagccttaat

SEQ ID NO: 1839 - DNA, 25 bp, artificial sequence
  antisense probe sequence
tggttccttcagagggtgtctctgc

SEQ ID NO: 1840 - DNA, 25 bp, artificial sequence
  antisense probe sequence
tcttcactgcattcagcaatgcctg

SEQ ID NO: 1841 - DNA, 25 bp, artificial sequence
  antisense probe sequence
gggaactggacaggcttggacctca

SEQ ID NO: 1842 - DNA, 25 bp, artificial sequence
  antisense probe sequence
gcttggacctcatgtttcatttcta

SEQ ID NO: 1843 - DNA, 25 bp, artificial sequence
  antisense probe sequence
attgggcaacaatgggcatcttcca

SEQ ID NO: 1844 - DNA, 25 bp, artificial sequence
  antisense probe sequence
aacaatgggcatcttccatgccacc

SEQ ID NO: 1845 - DNA, 25 bp, artificial sequence
  antisense probe sequence
ccaccacccaggcataaccagttgg

SEQ ID NO: 1846 - DNA, 25 bp, artificial sequence
  antisense probe sequence
aaggtttcaaatgtgtctagtgttc

SEQ ID NO: 1847 - DNA, 25 bp, artificial sequence
  antisense probe sequence
atgtgtctagtgttcagtattgagg

SEQ ID NO: 1848 - DNA, 25 bp, artificial sequence
  antisense probe sequence
ggcaggcccaagtattttctgtgat

SEQ ID NO: 1849 - DNA, 25 bp, artificial sequence
  antisense probe sequence
gtattttctgtgatatcccaggtta

SEQ ID NO: 1850 - DNA, 25 bp, artificial sequence
  antisense probe sequence
gaggtctcagctcttggaggagggc

SEQ ID NO: 1851 - DNA, 25 bp, artificial sequence
  antisense probe sequence
aaccctcactagcaggactggtggt

SEQ ID NO: 1852 - DNA, 25 bp, artificial sequence
  antisense probe sequence
gtctcacctggggcctagagtggaa

SEQ ID NO: 1853 - DNA, 25 bp, artificial sequence
  antisense probe sequence
gggtgggttaacctcacacaagcac

SEQ ID NO: 1854 - DNA, 25 bp, artificial sequence
  antisense probe sequence
caagcacagatcccagactttgcca

SEQ ID NO: 1855 - DNA, 25 bp, artificial sequence
  antisense probe sequence
tagggacagaccctggcaggtcgct

SEQ ID NO: 1856 - DNA, 25 bp, artificial sequence
  antisense probe sequence
cccaccgagatttcctcaagtgtgc

SEQ ID NO: 1857 - DNA, 25 bp, artificial sequence
  antisense probe sequence
gagactcgagattccatcatagcgt

SEQ ID NO: 1858 - DNA, 25 bp, artificial sequence
  antisense probe sequence
ccctgatgggcttgtctgtgtttgc

SEQ ID NO: 1859 - DNA, 25 bp, artificial sequence
  antisense probe sequence
gtgtctgaggtcctgtgactgtacc

SEQ ID NO: 1860 - DNA, 25 bp, artificial sequence
  antisense probe sequence
tcctttgccctgggacatctgtatc

SEQ ID NO: 1861 - DNA, 25 bp, artificial sequence
  antisense probe sequence
ctaggcttgctttatcatcacatcc

SEQ ID NO: 1862 - DNA, 25 bp, artificial sequence
  antisense probe sequence
gaatatgcagaggccttggaggaag

SEQ ID NO: 1863 - DNA, 25 bp, artificial sequence
  antisense probe sequence
tggcagttatgacaggaaggctctc

SEQ ID NO: 1864 - DNA, 25 bp, artificial sequence
  antisense probe sequence
gcccctggcactgagcatgaggagc

SEQ ID NO: 1865 - DNA, 25 bp, artificial sequence
  antisense probe sequence
tggggagactttgcaatcacccccc

SEQ ID NO: 1866 - DNA, 25 bp, artificial sequence
  antisense probe sequence
gtccattttccacaggtagctttct

SEQ ID NO: 1867 - DNA, 25 bp, artificial sequence
  antisense probe sequence
ggtagctttcttgaactcaccttga

SEQ ID NO: 1868 - DNA, 25 bp, artificial sequence
  antisense probe sequence
ggagctgaaagacagtcctgaactg

SEQ ID NO: 1869 - DNA, 25 bp, artificial sequence
  antisense probe sequence
gaactggggggagctgggatcacat

SEQ ID NO: 1870 - DNA, 25 bp, artificial sequence
  antisense probe sequence
gccctgtccctcacaggaagtgaga

SEQ ID NO: 1871 - DNA, 25 bp, artificial sequence
  antisense probe sequence
tggtgactaaggccccaaagtccct

SEQ ID NO: 1872 - DNA, 25 bp, artificial sequence
  antisense probe sequence
aggggaagaaacgacagcctcactt

SEQ ID NO: 1873 - DNA, 25 bp, artificial sequence
  antisense probe sequence
gaaacgacagcctcacttctgtatg

SEQ ID NO: 1874 - DNA, 25 bp, artificial sequence
  antisense probe sequence
cagcctcacttctgtatggactgct

SEQ ID NO: 1875 - DNA, 25 bp, artificial sequence
  antisense probe sequence
tctgtatggactgctgatgtggcct

SEQ ID NO: 1876 - DNA, 25 bp, artificial sequence
  antisense probe sequence
cctgttcagcgggcattgtctttgg

SEQ ID NO: 1877 - DNA, 25 bp, artificial sequence
  antisense probe sequence
tcagcgggcattgtctttggagcag

SEQ ID NO: 1878 - DNA, 25 bp, artificial sequence
  antisense probe sequence
ggcattgtctttggagcagcaggag

SEQ ID NO: 1879 - DNA, 25 bp, artificial sequence
  antisense probe sequence
cctcctgttgggtaagggtgttgag

SEQ ID NO: 1880 - DNA, 25 bp, artificial sequence
  antisense probe sequence
gggtgttgagtgtgacttgtgctga

SEQ ID NO: 1881 - DNA, 25 bp, artificial sequence
  antisense probe sequence
tgagtgtgacttgtgctgaaaacct

SEQ ID NO: 1882 - DNA, 25 bp, artificial sequence
  antisense probe sequence
gtgctgaaaacctggttcatatata

SEQ ID NO: 1883 - DNA, 25 bp, artificial sequence
  antisense probe sequence
caatctatattcacaggcccatact

SEQ ID NO: 1884 - DNA, 25 bp, artificial sequence
  antisense probe sequence
cccatacttcagtcagtccaatcat

SEQ ID NO: 1885 - DNA, 25 bp, artificial sequence
  antisense probe sequence
cagtcagtccaatcatagtacagtg

SEQ ID NO: 1886 - DNA, 25 bp, artificial sequence
  antisense probe sequence
aatagttcaccatgggtatgagata

SEQ ID NO: 1887 - DNA, 25 bp, artificial sequence
  antisense probe sequence
gtggcactattagggaatcttcctt

SEQ ID NO: 1888 - DNA, 25 bp, artificial sequence
  antisense probe sequence
atctagagtttttacctgccttatc

SEQ ID NO: 1889 - DNA, 25 bp, artificial sequence
  antisense probe sequence
tacctgccttatctgaattcttctt

SEQ ID NO: 1890 - DNA, 25 bp, artificial sequence
  antisense probe sequence
gaattcttcttgaaacttgagctta

SEQ ID NO: 1891 - DNA, 25 bp, artificial sequence
  antisense probe sequence
taaactctaatagctgtttcccttt

SEQ ID NO: 1892 - DNA, 25 bp, artificial sequence
  antisense probe sequence
tttccctttctattctgaacaactg

SEQ ID NO: 1893 - DNA, 25 bp, artificial sequence
  antisense probe sequence
ctgaacaactgtctccatttttcaa

SEQ ID NO: 1894 - DNA, 25 bp, artificial sequence
  antisense probe sequence
tttgatggggacagcccacgtctga

SEQ ID NO: 1895 - DNA, 25 bp, artificial sequence
  antisense probe sequence
ggacagcccacgtctgatagggtgg

SEQ ID NO: 1896 - DNA, 25 bp, artificial sequence
  antisense probe sequence
agagggttgtgctctttctagtgtg

SEQ ID NO: 1897 - DNA, 25 bp, artificial sequence
  antisense probe sequence
agatgatatgttgtagccacttctg

SEQ ID NO: 1898 - DNA, 25 bp, artificial sequence
  antisense probe sequence
ccacttctgcagtgacggggacaga

SEQ ID NO: 1899 - DNA, 25 bp, artificial sequence
  antisense probe sequence
gagtcagtgttcttaactacagtgg

SEQ ID NO: 1900 - DNA, 25 bp, artificial sequence
  antisense probe sequence
atttatttctttggttagtggtgca

SEQ ID NO: 1901 - DNA, 25 bp, artificial sequence
  antisense probe sequence
gtggtgcaagaaattctgttttcct

SEQ ID NO: 1902 - DNA, 25 bp, artificial sequence
  antisense probe sequence
aacagcttgtagatgccagacttca

SEQ ID NO: 1903 - DNA, 25 bp, artificial sequence
  antisense probe sequence
gccagacttcaacaaacagcacagc

SEQ ID NO: 1904 - DNA, 25 bp, artificial sequence
  antisense probe sequence
gagagagtttgtaagttctacttct

SEQ ID NO: 1905 - DNA, 25 bp, artificial sequence
  antisense probe sequence
gtgccagacttctgagaagcacctg

SEQ ID NO: 1906 - DNA, 25 bp, artificial sequence
  antisense probe sequence
caacagcttccttctttgagcttag

SEQ ID NO: 1907 - DNA, 25 bp, artificial sequence
  antisense probe sequence
tgatgaccaactaattcccaaaccc

SEQ ID NO: 1908 - DNA, 25 bp, artificial sequence
  antisense probe sequence
gccacaattggttttgaagtgcatt

SEQ ID NO: 1909 - DNA, 25 bp, artificial sequence
  antisense probe sequence
tggcatcactaccactactgattaa

SEQ ID NO: 1910 - DNA, 25 bp, artificial sequence
  antisense probe sequence
tcatctgctttattcacataaatga

SEQ ID NO: 1911 - DNA, 25 bp, artificial sequence
  antisense probe sequence
aattaagtggcttcgtcattgtcct

SEQ ID NO: 1912 - DNA, 25 bp, artificial sequence
  antisense probe sequence
tgtccttctacctcaaagataattt

SEQ ID NO: 1913 - DNA, 25 bp, artificial sequence
  antisense probe sequence
gtgaccaccagaaagtaatcttaag

SEQ ID NO: 1914 - DNA, 25 bp, artificial sequence
  antisense probe sequence
gtaatcttaagccatctagatgtca

SEQ ID NO: 1915 - DNA, 25 bp, artificial sequence
  antisense probe sequence
gccatctagatgtcacaattgaaac

SEQ ID NO: 1916 - DNA, 25 bp, artificial sequence
  antisense probe sequence
cgaagccggcggcgtgaacaatcct

SEQ ID NO: 1917 - DNA, 25 bp, artificial sequence
  antisense probe sequence
caggaactcacacctggttcagcat

SEQ ID NO: 1918 - DNA, 25 bp, artificial sequence
  antisense probe sequence
gcaggcggagcaaaggcagggcagc

SEQ ID NO: 1919 - DNA, 25 bp, artificial sequence
  antisense probe sequence
ggaagagccttctgtgggtgcttcc

SEQ ID NO: 1920 - DNA, 25 bp, artificial sequence
  antisense probe sequence
tcatgggtgacttctgactttctaa

SEQ ID NO: 1921 - DNA, 25 bp, artificial sequence
  antisense probe sequence
cttcccaagcacccgaggttggttg

SEQ ID NO: 1922 - DNA, 25 bp, artificial sequence
  antisense probe sequence
ggttggtcccaaatctatcaaactc

SEQ ID NO: 1923 - DNA, 25 bp, artificial sequence
  antisense probe sequence
gccctctttagcgacatattttgtg

SEQ ID NO: 1924 - DNA, 25 bp, artificial sequence
  antisense probe sequence
ttgtgacattccttccattacacca

SEQ ID NO: 1925 - DNA, 25 bp, artificial sequence
  antisense probe sequence
ataacctacccacctgtgtaatgtc

SEQ ID NO: 1926 - DNA, 25 bp, artificial sequence
  antisense probe sequence
aatcaatatgcggccccattttgta

SEQ ID NO: 1927 - DNA, 25 bp, artificial sequence
  antisense probe sequence
gttccttttcgattcttggtcttat

SEQ ID NO: 1928 - DNA, 25 bp, artificial sequence
  antisense probe sequence
atttcttcacccatctactatagtg

SEQ ID NO: 1929 - DNA, 25 bp, artificial sequence
  antisense probe sequence
tatagtgcattcttgccatgcagcc

SEQ ID NO: 1930 - DNA, 25 bp, artificial sequence
  antisense probe sequence
gccatgcagccctttttatggagca

SEQ ID NO: 1931 - DNA, 25 bp, artificial sequence
  antisense probe sequence
acagcagcttgcttcattagggcaa

SEQ ID NO: 1932 - DNA, 25 bp, artificial sequence
  antisense probe sequence
ggaggctgcatcatggggagccatt

SEQ ID NO: 1933 - DNA, 25 bp, artificial sequence
  antisense probe sequence
gggagccattttacaagcagcacca

SEQ ID NO: 1934 - DNA, 25 bp, artificial sequence
  antisense probe sequence
ttacatttgttctgctcttaagagt

SEQ ID NO: 1935 - DNA, 25 bp, artificial sequence
  antisense probe sequence
aatgtgtaagtctgtcgtttgttct

SEQ ID NO: 1936 - DNA, 25 bp, artificial sequence
  antisense probe sequence
gtcgtttgttcttgacttctgtcat

SEQ ID NO: 1937 - DNA, 25 bp, artificial sequence
  antisense probe sequence
aatctcagttcatcaacgaatcggt

SEQ ID NO: 1938 - DNA, 25 bp, artificial sequence
  antisense probe sequence
ctcagcctcctaaggagctattttt

SEQ ID NO: 1939 - DNA, 25 bp, artificial sequence
  antisense probe sequence
gtgcccagctagattctttactttt

SEQ ID NO: 1940 - DNA, 25 bp, artificial sequence
  antisense probe sequence
tatgcctctttctgtagatcaaatg

SEQ ID NO: 1941 - DNA, 25 bp, artificial sequence
  antisense probe sequence
gaaatatggcccaatttacaagggt

SEQ ID NO: 1942 - DNA, 25 bp, artificial sequence
  antisense probe sequence
gggtatacaccttcatggtagatga

SEQ ID NO: 1943 - DNA, 25 bp, artificial sequence
  antisense probe sequence
gatttaattgtagtttctgctgcca

SEQ ID NO: 1944 - DNA, 25 bp, artificial sequence
  antisense probe sequence
gccaaaaagtctccataattatttt

SEQ ID NO: 1945 - DNA, 25 bp, artificial sequence
  antisense probe sequence
aataacttataactaccttgatctt

SEQ ID NO: 1946 - DNA, 25 bp, artificial sequence
  antisense probe sequence
taactaccttgatctttacctgtac

SEQ ID NO: 1947 - DNA, 25 bp, artificial sequence
  antisense probe sequence
ccttgatctttacctgtacacacac

SEQ ID NO: 1948 - DNA, 25 bp, artificial sequence
  antisense probe sequence
gtaatttcacttagaatcctggtca

SEQ ID NO: 1949 - DNA, 25 bp, artificial sequence
  antisense probe sequence
ggactcacactggagaaagacccta

SEQ ID NO: 1950 - DNA, 25 bp, artificial sequence
  antisense probe sequence
aagaccctatgaatgtaaacactgt

SEQ ID NO: 1951 - DNA, 25 bp, artificial sequence
  antisense probe sequence
agtcgttccagtttctgtcgagaac

SEQ ID NO: 1952 - DNA, 25 bp, artificial sequence
  antisense probe sequence
tgtgggaaagccttcagttctctca

SEQ ID NO: 1953 - DNA, 25 bp, artificial sequence
  antisense probe sequence
ttcagttctctcagttcctttaata

SEQ ID NO: 1954 - DNA, 25 bp, artificial sequence
  antisense probe sequence
gcattcattggttttatcacattca

SEQ ID NO: 1955 - DNA, 25 bp, artificial sequence
  antisense probe sequence
aaatcctgtgaatgtaaacgtggta

SEQ ID NO: 1956 - DNA, 25 bp, artificial sequence
  antisense probe sequence
aagaagtttccaggctgggcgcagc

SEQ ID NO: 1957 - DNA, 25 bp, artificial sequence
  antisense probe sequence
gccgaggagggcagatcacgaggcc

SEQ ID NO: 1958 - DNA, 25 bp, artificial sequence
  antisense probe sequence
tagccaggcatagttgctcacacct

SEQ ID NO: 1959 - DNA, 25 bp, artificial sequence
  antisense probe sequence
aggcatagttgctcacacctgtagt

SEQ ID NO: 1960 - DNA, 25 bp, artificial sequence
  antisense probe sequence
gaaaaatccgtggaactgaagctga

SEQ ID NO: 1961 - DNA, 25 bp, artificial sequence
  antisense probe sequence
actgaagctgagatctttagtacgt

SEQ ID NO: 1962 - DNA, 25 bp, artificial sequence
  antisense probe sequence
gagatctttagtacgtggagtcacc

SEQ ID NO: 1963 - DNA, 25 bp, artificial sequence
  antisense probe sequence
gtacgtggagtcaccttacagatac

SEQ ID NO: 1964 - DNA, 25 bp, artificial sequence
  antisense probe sequence
ggagtcaccttacagatacagagca

SEQ ID NO: 1965 - DNA, 25 bp, artificial sequence
  antisense probe sequence
tcaccttacagatacagagcattta

SEQ ID NO: 1966 - DNA, 25 bp, artificial sequence
  antisense probe sequence
gagcatttatgcggtattcattggt

SEQ ID NO: 1967 - DNA, 25 bp, artificial sequence
  antisense probe sequence
tatgcggtattcattggtgcctaaa

SEQ ID NO: 1968 - DNA, 25 bp, artificial sequence
  antisense probe sequence
gtattcattggtgcctaaagaactt

SEQ ID NO: 1969 - DNA, 25 bp, artificial sequence
  antisense probe sequence
aaagaactttaggcatcctctggaa

SEQ ID NO: 1970 - DNA, 25 bp, artificial sequence
  antisense probe sequence
ttaggcatcctctggaaaaccggcc

SEQ ID NO: 1971 - DNA, 25 bp, artificial sequence
  antisense probe sequence
acagagacgcaagagaaaaatccac

SEQ ID NO: 1972 - DNA, 25 bp, artificial sequence
  antisense probe sequence
aatccactgccttccaaagaaacga

SEQ ID NO: 1973 - DNA, 25 bp, artificial sequence
  antisense probe sequence
cactgccttccaaagaaacgattga

SEQ ID NO: 1974 - DNA, 25 bp, artificial sequence
  antisense probe sequence
ggagaagcaagcaggcgaatcgtaa

SEQ ID NO: 1975 - DNA, 25 bp, artificial sequence
  antisense probe sequence
agcaggcgaatcgtaatgaggcgtg

SEQ ID NO: 1976 - DNA, 25 bp, artificial sequence
  antisense probe sequence
tgcactgtacattccacaagcattg

SEQ ID NO: 1977 - DNA, 25 bp, artificial sequence
  antisense probe sequence
actgtacattccacaagcattgcct

SEQ ID NO: 1978 - DNA, 25 bp, artificial sequence
  antisense probe sequence
agatgcaaagaggttggatcaagtt

SEQ ID NO: 1979 - DNA, 25 bp, artificial sequence
  antisense probe sequence
aagtttaaatgactgtgctgcccct

SEQ ID NO: 1980 - DNA, 25 bp, artificial sequence
  antisense probe sequence
gaaagaacttgcatgttggtgaagg

SEQ ID NO: 1981 - DNA, 25 bp, artificial sequence
  antisense probe sequence
gctgtaatgcagtttaatcagagtg

SEQ ID NO: 1982 - DNA, 25 bp, artificial sequence
  antisense probe sequence
gagaagaagtccccaacatgactgt

SEQ ID NO: 1983 - DNA, 25 bp, artificial sequence
  antisense probe sequence
gcagtgggtgtccagagcaaacaaa

SEQ ID NO: 1984 - DNA, 25 bp, artificial sequence
  antisense probe sequence
aagaacttattttggctggacagca

SEQ ID NO: 1985 - DNA, 25 bp, artificial sequence
  antisense probe sequence
ggacagcaagcagagtgccagttcc

SEQ ID NO: 1986 - DNA, 25 bp, artificial sequence
  antisense probe sequence
agagtgccagttccaaagatgagct

SEQ ID NO: 1987 - DNA, 25 bp, artificial sequence
  antisense probe sequence
gatgagcttgtttgtagcaccacca

SEQ ID NO: 1988 - DNA, 25 bp, artificial sequence
  antisense probe sequence
gtaatacatggctgagtcttcctct

SEQ ID NO: 1989 - DNA, 25 bp, artificial sequence
  antisense probe sequence
gctgagtcttcctcttgagcaaatg

SEQ ID NO: 1990 - DNA, 25 bp, artificial sequence
  antisense probe sequence
gagcaaatggtttcttcaggtggaa

SEQ ID NO: 1991 - DNA, 25 bp, artificial sequence
  antisense probe sequence
ggtggaaagatgtctcgcctttgtt

SEQ ID NO: 1992 - DNA, 25 bp, artificial sequence
  antisense probe sequence
gtctcgcctttgttaaggtcagcag

SEQ ID NO: 1993 - DNA, 25 bp, artificial sequence
  antisense probe sequence
tgtaatcccagttacacagaagact

SEQ ID NO: 1994 - DNA, 25 bp, artificial sequence
  antisense probe sequence
gaggacagcgtgcttttgtgtactg

SEQ ID NO: 1995 - DNA, 25 bp, artificial sequence
  antisense probe sequence
agcgtgcttttgtgtactgttggaa

SEQ ID NO: 1996 - DNA, 25 bp, artificial sequence
  antisense probe sequence
ccacagctgactgggcagcaggcac

SEQ ID NO: 1997 - DNA, 25 bp, artificial sequence
  antisense probe sequence
tgactgggcagcaggcacaggccct

SEQ ID NO: 1998 - DNA, 25 bp, artificial sequence
  antisense probe sequence
acccgagcaggccggagttggctcg

SEQ ID NO: 1999 - DNA, 25 bp, artificial sequence
  antisense probe sequence
cgagcaggccggagttggctcgcat

SEQ ID NO: 2000 - DNA, 25 bp, artificial sequence
  antisense probe sequence
ctgcctgtgtacatttctccagata

SEQ ID NO: 2001 - DNA, 25 bp, artificial sequence
  antisense probe sequence
acatttctccagataccctatggct

SEQ ID NO: 2002 - DNA, 25 bp, artificial sequence
  antisense probe sequence
ccagataccctatggctaattttgt

SEQ ID NO: 2003 - DNA, 25 bp, artificial sequence
  antisense probe sequence
ggctaattttgttataactgcacag

SEQ ID NO: 2004 - DNA, 25 bp, artificial sequence
  antisense probe sequence
tctcctttctcaccaatgggcaata

SEQ ID NO: 2005 - DNA, 25 bp, artificial sequence
  antisense probe sequence
tcctttctcaccaatgggcaatagc

SEQ ID NO: 2006 - DNA, 25 bp, artificial sequence
  antisense probe sequence
tatttttcccaaagatagctttact

SEQ ID NO: 2007 - DNA, 25 bp, artificial sequence
  antisense probe sequence
gtcaaattaatgcatgctccttaca

SEQ ID NO: 2008 - DNA, 25 bp, artificial sequence
  antisense probe sequence
aatgcatgctccttacaacaaacaa

SEQ ID NO: 2009 - DNA, 25 bp, artificial sequence
  antisense probe sequence
atgctccttacaacaaacaaatatc

SEQ ID NO: 2010 - DNA, 25 bp, artificial sequence
  antisense probe sequence
gagtttaggaattctactagccaga

SEQ ID NO: 2011 - DNA, 25 bp, artificial sequence
  antisense probe sequence
actagccagagatagtcacttggag

SEQ ID NO: 2012 - DNA, 25 bp, artificial sequence
  antisense probe sequence
gatagtcacttggagaaactttcta

SEQ ID NO: 2013 - DNA, 25 bp, artificial sequence
  antisense probe sequence
gaaactttctatatatccttctaaa

SEQ ID NO: 2014 - DNA, 25 bp, artificial sequence
  antisense probe sequence
caccccactgataaccaaatcacag

SEQ ID NO: 2015 - DNA, 25 bp, artificial sequence
  antisense probe sequence
tagggactggcgccaaatggtctct

SEQ ID NO: 2016 - DNA, 25 bp, artificial sequence
  antisense probe sequence
ccaattttggtatcttctctggcct

SEQ ID NO: 2017 - DNA, 25 bp, artificial sequence
  antisense probe sequence
ctctttctcaaagcacagtaatgtg

SEQ ID NO: 2018 - DNA, 25 bp, artificial sequence
  antisense probe sequence
agcacctcagtgaagggggcctgct

SEQ ID NO: 2019 - DNA, 25 bp, artificial sequence
  antisense probe sequence
ggggtaggaggaaggttgttagcat

SEQ ID NO: 2020 - DNA, 25 bp, artificial sequence
  antisense probe sequence
ttgttagcatctactgctgccgtac

SEQ ID NO: 2021 - DNA, 25 bp, artificial sequence
  antisense probe sequence
ctgctgccgtaccctaggaatatgg

SEQ ID NO: 2022 - DNA, 25 bp, artificial sequence
  antisense probe sequence
gacatggacatggtgtcccatgccc

SEQ ID NO: 2023 - DNA, 25 bp, artificial sequence
  antisense probe sequence
gtgtcccatgcccagatgataaaca

SEQ ID NO: 2024 - DNA, 25 bp, artificial sequence
  antisense probe sequence
atgataaacactgagctgccaaaac

SEQ ID NO: 2025 - DNA, 25 bp, artificial sequence
  antisense probe sequence
acactgagctgccaaaacatttttt

SEQ ID NO: 2026 - DNA, 25 bp, artificial sequence
  antisense probe sequence
agtcctgtctgtgtggactggcacc

SEQ ID NO: 2027 - DNA, 25 bp, artificial sequence
  antisense probe sequence
gcacgttacctcaggaatgggcccc

SEQ ID NO: 2028 - DNA, 25 bp, artificial sequence
  antisense probe sequence
catgaaggggcccatctgtcagcag

SEQ ID NO: 2029 - DNA, 25 bp, artificial sequence
  antisense probe sequence
tgttacactagcctgccgatgagac

SEQ ID NO: 2030 - DNA, 25 bp, artificial sequence
  antisense probe sequence
gccgatgagacccagacacaggcag

SEQ ID NO: 2031 - DNA, 25 bp, artificial sequence
  antisense probe sequence
cttgacccctgattccagtgaggac

SEQ ID NO: 2032 - DNA, 25 bp, artificial sequence
  antisense probe sequence
cacgacaggcccaaagatggacccc

SEQ ID NO: 2033 - DNA, 25 bp, artificial sequence
  antisense probe sequence
tccccaagtgttctccggtggagaa

SEQ ID NO: 2034 - DNA, 25 bp, artificial sequence
  antisense probe sequence
atcaccatcctgtgtacaatggctg

SEQ ID NO: 2035 - DNA, 25 bp, artificial sequence
  antisense probe sequence
gtagacttgtatatggctcctttaa

SEQ ID NO: 2036 - DNA, 25 bp, artificial sequence
  antisense probe sequence
gtgtgaacacattgcgttcccagtc

SEQ ID NO: 2037 - DNA, 25 bp, artificial sequence
  antisense probe sequence
actgaattctccaacagactctacc

SEQ ID NO: 2038 - DNA, 25 bp, artificial sequence
  antisense probe sequence
ccactgtcactcctcagaaagctaa

SEQ ID NO: 2039 - DNA, 25 bp, artificial sequence
  antisense probe sequence
gaagccttcattgctgatcttgaca

SEQ ID NO: 2040 - DNA, 25 bp, artificial sequence
  antisense probe sequence
tctgggtcctttcatcataagggag

SEQ ID NO: 2041 - DNA, 25 bp, artificial sequence
  antisense probe sequence
gcttcagaaagttccgaggacctgc

SEQ ID NO: 2042 - DNA, 25 bp, artificial sequence
  antisense probe sequence
gaggacctgctaaaatcagctacta

SEQ ID NO: 2043 - DNA, 25 bp, artificial sequence
  antisense probe sequence
tcagctactagaatctgctgccaga

SEQ ID NO: 2044 - DNA, 25 bp, artificial sequence
  antisense probe sequence
ggacaaagacgtgcactcaaccttc

SEQ ID NO: 2045 - DNA, 25 bp, artificial sequence
  antisense probe sequence
caggctcaccttaaaatcagccctt

SEQ ID NO: 2046 - DNA, 25 bp, artificial sequence
  antisense probe sequence
gaacagacgatccatgctaatattg

SEQ ID NO: 2047 - DNA, 25 bp, artificial sequence
  antisense probe sequence
tagcagtaagctttcccattataat

SEQ ID NO: 2048 - DNA, 25 bp, artificial sequence
  antisense probe sequence
tgctggctggccatttacttccagc

SEQ ID NO: 2049 - DNA, 25 bp, artificial sequence
  antisense probe sequence
ccagcccttatgaggagtttcccct

SEQ ID NO: 2050 - DNA, 25 bp, artificial sequence
  antisense probe sequence
ccttaccggctccatatggggtaca

SEQ ID NO: 2051 - DNA, 25 bp, artificial sequence
  antisense probe sequence
tcaccccaacttgggaaaccctctg

SEQ ID NO: 2052 - DNA, 25 bp, artificial sequence
  antisense probe sequence
ctccagagccccttgtggggtcagt

SEQ ID NO: 2053 - DNA, 25 bp, artificial sequence
  antisense probe sequence
cagtgagacctcattgtggccacat

SEQ ID NO: 2054 - DNA, 25 bp, artificial sequence
  antisense probe sequence
attgtggccacattacagcccagtg

SEQ ID NO: 2055 - DNA, 25 bp, artificial sequence
  antisense probe sequence
cacctcagtatctgctttcggggaa

SEQ ID NO: 2056 - DNA, 25 bp, artificial sequence
  antisense probe sequence
tatctgctttcggggaacccaacct

SEQ ID NO: 2057 - DNA, 25 bp, artificial sequence
  antisense probe sequence
cagtcctgcaggtttgaactctgac

SEQ ID NO: 2058 - DNA, 25 bp, artificial sequence
  antisense probe sequence
gacttttccagttatctcgtggaat

SEQ ID NO: 2059 - DNA, 25 bp, artificial sequence
  antisense probe sequence
gggcatggtaattagcctttcccca

SEQ ID NO: 2060 - DNA, 25 bp, artificial sequence
  antisense probe sequence
caagggtcaactgaattccccactt

SEQ ID NO: 2061 - DNA, 25 bp, artificial sequence
  antisense probe sequence
tgatctccttttaatttcacgtcta

SEQ ID NO: 2062 - DNA, 25 bp, artificial sequence
  antisense probe sequence
ttcacgtctaagatcctggcagctt

SEQ ID NO: 2063 - DNA, 25 bp, artificial sequence
  antisense probe sequence
tcctgctgggactgtcagctcattt

SEQ ID NO: 2064 - DNA, 25 bp, artificial sequence
  antisense probe sequence
tgattattgctgccctgtgggtctt

SEQ ID NO: 2065 - DNA, 25 bp, artificial sequence
  antisense probe sequence
gtcttgctcaatactgttcatacct

SEQ ID NO: 2066 - DNA, 25 bp, artificial sequence
  antisense probe sequence
taggccccttaaatactgtgtagca

SEQ ID NO: 2067 - DNA, 25 bp, artificial sequence
  antisense probe sequence
cattaccagctgggtcaccttggat

SEQ ID NO: 2068 - DNA, 25 bp, artificial sequence
  antisense probe sequence
gtcaccttggatgggtctgtcaaca

SEQ ID NO: 2069 - DNA, 25 bp, artificial sequence
  antisense probe sequence
gagggtagtccctacctcataaggg

SEQ ID NO: 2070 - DNA, 25 bp, artificial sequence
  antisense probe sequence
ttccataggccgatgctctgaaaga

SEQ ID NO: 2071 - DNA, 25 bp, artificial sequence
  antisense probe sequence
gagacgtggggctcgagagatttaa

SEQ ID NO: 2072 - DNA, 25 bp, artificial sequence
  antisense probe sequence
cggccctgcaacggaggaggacagt

SEQ ID NO: 2073 - DNA, 25 bp, artificial sequence
  antisense probe sequence
gaggaggacagtgagacgatgccac

SEQ ID NO: 2074 - DNA, 25 bp, artificial sequence
  antisense probe sequence
cccctgcacactcacatatgtggca

SEQ ID NO: 2075 - DNA, 25 bp, artificial sequence
  antisense probe sequence
ctgccaccatgccatatagggacac

SEQ ID NO: 2076 - DNA, 25 bp, artificial sequence
  antisense probe sequence
tagggacacacctcagaaacccttc

SEQ ID NO: 2077 - DNA, 25 bp, artificial sequence
  antisense probe sequence
ccttccttgacagctctggacaggg

SEQ ID NO: 2078 - DNA, 25 bp, artificial sequence
  antisense probe sequence
gaaaatttggctccctcatgaaggt

SEQ ID NO: 2079 - DNA, 25 bp, artificial sequence
  antisense probe sequence
gctgctgttgacaccgaggttacat

SEQ ID NO: 2080 - DNA, 25 bp, artificial sequence
  antisense probe sequence
atgttctgcaaatccaacacacgtt

SEQ ID NO: 2081 - DNA, 25 bp, artificial sequence
  antisense probe sequence
gacagttcagaatcatgttccccat

SEQ ID NO: 2082 - DNA, 25 bp, artificial sequence
  antisense probe sequence
tccccattctggtgttggatctata

SEQ ID NO: 2083 - DNA, 25 bp, artificial sequence
  antisense probe sequence
gaatccttaccacagagtccagatt

SEQ ID NO: 2084 - DNA, 25 bp, artificial sequence
  antisense probe sequence
cagtattctatcagtacagctctct

SEQ ID NO: 2085 - DNA, 25 bp, artificial sequence
  antisense probe sequence
gctctctgcagcttaaactcggtgg

SEQ ID NO: 2086 - DNA, 25 bp, artificial sequence
  antisense probe sequence
aagactgctgaggccaagtgctatt

SEQ ID NO: 2087 - DNA, 25 bp, artificial sequence
  antisense probe sequence
aacttggctattttcttgacacttt

SEQ ID NO: 2088 - DNA, 25 bp, artificial sequence
  antisense probe sequence
taatgtgctgctaggttttttgttt

SEQ ID NO: 2089 - DNA, 25 bp, artificial sequence
  antisense probe sequence
atttgcctttaatcttattgttctc

SEQ ID NO: 2090 - DNA, 25 bp, artificial sequence
  antisense probe sequence
gaactggttgattctgggaggcatc

SEQ ID NO: 2091 - DNA, 25 bp, artificial sequence
  antisense probe sequence
tggatatgtacatgtcctattctac

SEQ ID NO: 2092 - DNA, 25 bp, artificial sequence
  antisense probe sequence
agtgttgtgtagcttaatccttctg

SEQ ID NO: 2093 - DNA, 25 bp, artificial sequence
  antisense probe sequence
tgtagcttaatccttctgaagtctt

SEQ ID NO: 2094 - DNA, 25 bp, artificial sequence
  antisense probe sequence
tgtcatgtagctattaatctgtggc

SEQ ID NO: 2095 - DNA, 25 bp, artificial sequence
  antisense probe sequence
tttaattttgttgtgcctgcttcat

SEQ ID NO: 2096 - DNA, 25 bp, artificial sequence
  antisense probe sequence
gtgcctgcttcattttgcaataaca

SEQ ID NO: 2097 - DNA, 25 bp, artificial sequence
  antisense probe sequence
gaatttcaggcaaaactacatttat

SEQ ID NO: 2098 - DNA, 25 bp, artificial sequence
  antisense probe sequence
taacagcttgttcataggctcttgt

SEQ ID NO: 2099 - DNA, 25 bp, artificial sequence
  antisense probe sequence
attgtttgtcggtgaagtgttagtc

SEQ ID NO: 2100 - DNA, 25 bp, artificial sequence
  antisense probe sequence
caaaagtttgcacatattgttctgt

SEQ ID NO: 2101 - DNA, 25 bp, artificial sequence
  antisense probe sequence
tctcttttcctattacatcattcat

SEQ ID NO: 2102 - DNA, 25 bp, artificial sequence
  antisense probe sequence
aagtgatcactttaccattttgaaa

SEQ ID NO: 2103 - DNA, 25 bp, artificial sequence
  antisense probe sequence
gaacaggtgaccataactctgccaa

SEQ ID NO: 2104 - DNA, 25 bp, artificial sequence
  antisense probe sequence
atgtggaattcagccaggactccca

SEQ ID NO: 2105 - DNA, 25 bp, artificial sequence
  antisense probe sequence
gccaggactcccaatcttgtaaaac

SEQ ID NO: 2106 - DNA, 25 bp, artificial sequence
  antisense probe sequence
agataagatgtccccagcatctcca

SEQ ID NO: 2107 - DNA, 25 bp, artificial sequence
  antisense probe sequence
agttcatcagattccaaaagttcat

SEQ ID NO: 2108 - DNA, 25 bp, artificial sequence
  antisense probe sequence
aagttcatcatcttcaagtagtgag

SEQ ID NO: 2109 - DNA, 25 bp, artificial sequence
  antisense probe sequence
gattgcaaatcctctacttctgata

SEQ ID NO: 2110 - DNA, 25 bp, artificial sequence
  antisense probe sequence
gaattgtgtctcaggacatcctacc

SEQ ID NO: 2111 - DNA, 25 bp, artificial sequence
  antisense probe sequence
gacatcctaccatgacacagtacag

SEQ ID NO: 2112 - DNA, 25 bp, artificial sequence
  antisense probe sequence
agatttcgagacaacagtggccttc

SEQ ID NO: 2113 - DNA, 25 bp, artificial sequence
  antisense probe sequence
acagtggccttctgatgaatacttt

SEQ ID NO: 2114 - DNA, 25 bp, artificial sequence
  antisense probe sequence
atcaggcacactttcttcagaggca

SEQ ID NO: 2115 - DNA, 25 bp, artificial sequence
  antisense probe sequence
gtagacggggtggcatcatggcatc

SEQ ID NO: 2116 - DNA, 25 bp, artificial sequence
  antisense probe sequence
tggcatctttatatacatcccatcc

SEQ ID NO: 2117 - DNA, 25 bp, artificial sequence
  antisense probe sequence
tacatcccatccagctgacaatgga

SEQ ID NO: 2118 - DNA, 25 bp, artificial sequence
  antisense probe sequence
tacaggctgttttggaggatacgtt

SEQ ID NO: 2119 - DNA, 25 bp, artificial sequence
  antisense probe sequence
gaaaacctaaaacaagcctcttgct

SEQ ID NO: 2120 - DNA, 25 bp, artificial sequence
  antisense probe sequence
acaggagtaggtgccactgacctct

SEQ ID NO: 2121 - DNA, 25 bp, artificial sequence
  antisense probe sequence
actgacctctattgttggagacttt

SEQ ID NO: 2122 - DNA, 25 bp, artificial sequence
  antisense probe sequence
tccactttttgtttcagccagtaaa

SEQ ID NO: 2123 - DNA, 25 bp, artificial sequence
  antisense probe sequence
tattgttttgcttcatctgtacaca

SEQ ID NO: 2124 - DNA, 25 bp, artificial sequence
  antisense probe sequence
gacagcctgtcattgaatctaaaca

SEQ ID NO: 2125 - DNA, 25 bp, artificial sequence
  antisense probe sequence
agcagaggatgctcattcggctcag

SEQ ID NO: 2126 - DNA, 25 bp, artificial sequence
  antisense probe sequence
gatgctcattcggctcagaagtgga

SEQ ID NO: 2127 - DNA, 25 bp, artificial sequence
  antisense probe sequence
gaagcatttcaggaaggcacaatat

SEQ ID NO: 2128 - DNA, 25 bp, artificial sequence
  antisense probe sequence
gtagcagtattggtttcatctcttc

SEQ ID NO: 2129 - DNA, 25 bp, artificial sequence
  antisense probe sequence
gtttcatctcttctgtgattccaaa

SEQ ID NO: 2130 - DNA, 25 bp, artificial sequence
  antisense probe sequence
gccaagataaagccaaccagaccct

SEQ ID NO: 2131 - DNA, 25 bp, artificial sequence
  antisense probe sequence
ccaaccagacccttcatcaaagaaa

SEQ ID NO: 2132 - DNA, 25 bp, artificial sequence
  antisense probe sequence
tatttctgagacacactgaattcta

SEQ ID NO: 2133 - DNA, 25 bp, artificial sequence
  antisense probe sequence
gtatactgtattaactattcgtgac

SEQ ID NO: 2134 - DNA, 25 bp, artificial sequence
  antisense probe sequence
gacatagttcacactgttttcttac

SEQ ID NO: 2135 - DNA, 25 bp, artificial sequence
  antisense probe sequence
tttccacaaagtgcttggtttagga

SEQ ID NO: 2136 - DNA, 25 bp, artificial sequence
  antisense probe sequence
ttcttgcatccttctgtgattcaaa

SEQ ID NO: 2137 - DNA, 25 bp, artificial sequence
  antisense probe sequence
tgtaaatgtgccacgagctccaaca

SEQ ID NO: 2138 - DNA, 25 bp, artificial sequence
  antisense probe sequence
agctccaacacgaccatcgtagggt

SEQ ID NO: 2139 - DNA, 25 bp, artificial sequence
  antisense probe sequence
tcgtagggtgaagcccacgttttct

SEQ ID NO: 2140 - DNA, 25 bp, artificial sequence
  antisense probe sequence
ctcaaaggccctagaacttgcctac

SEQ ID NO: 2141 - DNA, 25 bp, artificial sequence
  antisense probe sequence
atccatctcttgaactttatactct

SEQ ID NO: 2142 - DNA, 25 bp, artificial sequence
  antisense probe sequence
gaaaccctatgttgtcatcacttgg

SEQ ID NO: 2143 - DNA, 25 bp, artificial sequence
  antisense probe sequence
aaatattacctggccaatatcccac

SEQ ID NO: 2144 - DNA, 25 bp, artificial sequence
  antisense probe sequence
ctctgtatgctgtcacacctatatt

SEQ ID NO: 2145 - DNA, 25 bp, artificial sequence
  antisense probe sequence
cattgtaattacttcctgacctttg

SEQ ID NO: 2146 - DNA, 25 bp, artificial sequence
  antisense probe sequence
tgacctttgtatctactcttttagt

SEQ ID NO: 2147 - DNA, 25 bp, artificial sequence
  antisense probe sequence
aatatctttcctactagacactctc

SEQ ID NO: 2148 - DNA, 25 bp, artificial sequence
  antisense probe sequence
aagcttatcgacagatggccctact

SEQ ID NO: 2149 - DNA, 25 bp, artificial sequence
  antisense probe sequence
gccctactaagttctgcttttgcat

SEQ ID NO: 2150 - DNA, 25 bp, artificial sequence
  antisense probe sequence
ggagcaagtggaacctactatgtaa

SEQ ID NO: 2151 - DNA, 25 bp, artificial sequence
  antisense probe sequence
tgagaatcctaattgggccctttta

SEQ ID NO: 2152 - DNA, 25 bp, artificial sequence
  antisense probe sequence
gtgaggcattttctgaagcacttaa

SEQ ID NO: 2153 - DNA, 25 bp, artificial sequence
  antisense probe sequence
gtttcattctactttatatcacatg

SEQ ID NO: 2154 - DNA, 25 bp, artificial sequence
  antisense probe sequence
gaaagtcaggagttccaactgtcag

SEQ ID NO: 2155 - DNA, 25 bp, artificial sequence
  antisense probe sequence
caactgtcagtttgtcaactctgtg

SEQ ID NO: 2156 - DNA, 25 bp, artificial sequence
  antisense probe sequence
ctaccagattgctcagctactccta

SEQ ID NO: 2157 - DNA, 25 bp, artificial sequence
  antisense probe sequence
acaggtatttctgcaacacaatgta

SEQ ID NO: 2158 - DNA, 25 bp, artificial sequence
  antisense probe sequence
cgccagtacatcttctagcattgtc

SEQ ID NO: 2159 - DNA, 25 bp, artificial sequence
  antisense probe sequence
cagtacatcttctagcattgtcgtg

SEQ ID NO: 2160 - DNA, 25 bp, artificial sequence
  antisense probe sequence
ttctccgaatcctggttttgattgg

SEQ ID NO: 2161 - DNA, 25 bp, artificial sequence
  antisense probe sequence
gaatcctggttttgattggtcagat

SEQ ID NO: 2162 - DNA, 25 bp, artificial sequence
  antisense probe sequence
tggttttgattggtcagattctttt

SEQ ID NO: 2163 - DNA, 25 bp, artificial sequence
  antisense probe sequence
ttaacggtaattctcaaactatgtg

SEQ ID NO: 2164 - DNA, 25 bp, artificial sequence
  antisense probe sequence
ggtaattctcaaactatgtgttatt

SEQ ID NO: 2165 - DNA, 25 bp, artificial sequence
  antisense probe sequence
ataatctctttcactgaaatcttgt

SEQ ID NO: 2166 - DNA, 25 bp, artificial sequence
  antisense probe sequence
cactgaaatcttgtgatccattctt

SEQ ID NO: 2167 - DNA, 25 bp, artificial sequence
  antisense probe sequence
atcttgtgatccattctttaccttt

SEQ ID NO: 2168 - DNA, 25 bp, artificial sequence
  antisense probe sequence
tctttacctttccattttaataatg

SEQ ID NO: 2169 - DNA, 25 bp, artificial sequence
  antisense probe sequence
ataagtcatttctaatctttgtata

SEQ ID NO: 2170 - DNA, 25 bp, artificial sequence
  antisense probe sequence
gacaggctgtaagcatcgctgagaa

SEQ ID NO: 2171 - DNA, 25 bp, artificial sequence
  antisense probe sequence
aggacttttgacttttatctggata

SEQ ID NO: 2172 - DNA, 25 bp, artificial sequence
  antisense probe sequence
atcatggaaaggcatcagcattgca

SEQ ID NO: 2173 - DNA, 25 bp, artificial sequence
  antisense probe sequence
gcatctaggtagaaatcaggccaaa

SEQ ID NO: 2174 - DNA, 25 bp, artificial sequence
  antisense probe sequence
caaaattaagctgtggtttccctct

SEQ ID NO: 2175 - DNA, 25 bp, artificial sequence
  antisense probe sequence
ggtttccctctgagtagtgggaata

SEQ ID NO: 2176 - DNA, 25 bp, artificial sequence
  antisense probe sequence
aagacacttataattttccatacct

SEQ ID NO: 2177 - DNA, 25 bp, artificial sequence
  antisense probe sequence
attttccatacctattttcaactga

SEQ ID NO: 2178 - DNA, 25 bp, artificial sequence
  antisense probe sequence
gcaacttgtaagatttaactcagtc

SEQ ID NO: 2179 - DNA, 25 bp, artificial sequence
  antisense probe sequence
caataacatactggttttactcatc

SEQ ID NO: 2180 - DNA, 25 bp, artificial sequence
  antisense probe sequence
gttgtttactgaatcctggtgtgaa

SEQ ID NO: 2181 - DNA, 25 bp, artificial sequence
  antisense probe sequence
ctactgctgtacttccgatttacgg

SEQ ID NO: 2182 - DNA, 25 bp, artificial sequence
  antisense probe sequence
gagtacctatttatgtgggccttca

SEQ ID NO: 2183 - DNA, 25 bp, artificial sequence
  antisense probe sequence
gtgggccttcagtggatgggcagtg

SEQ ID NO: 2184 - DNA, 25 bp, artificial sequence
  antisense probe sequence
acaagtagtcctgtttgccactaaa

SEQ ID NO: 2185 - DNA, 25 bp, artificial sequence
  antisense probe sequence
gttatctctgccagtcacaagtgtg

SEQ ID NO: 2186 - DNA, 25 bp, artificial sequence
  antisense probe sequence
acaagtgtggctggtgtcattctgg

SEQ ID NO: 2187 - DNA, 25 bp, artificial sequence
  antisense probe sequence
tcattctgggtctgactggagccct

SEQ ID NO: 2188 - DNA, 25 bp, artificial sequence
  antisense probe sequence
ctcctggactgtttctttaatttca

SEQ ID NO: 2189 - DNA, 25 bp, artificial sequence
  antisense probe sequence
agccctgcagacatagtacctggtc

SEQ ID NO: 2190 - DNA, 25 bp, artificial sequence
  antisense probe sequence
tacctggtcagaactatgcctcggt

SEQ ID NO: 2191 - DNA, 25 bp, artificial sequence
  antisense probe sequence
aaagcttatccaccacgattaagcc

SEQ ID NO: 2192 - DNA, 25 bp, artificial sequence
  antisense probe sequence
caccacgattaagccggcttcatcc

SEQ ID NO: 2193 - DNA, 25 bp, artificial sequence
  antisense probe sequence
gcaaggctggttcagcatacacaaa

SEQ ID NO: 2194 - DNA, 25 bp, artificial sequence
  antisense probe sequence
aaaagccacatgatatttacctgta

SEQ ID NO: 2195 - DNA, 25 bp, artificial sequence
  antisense probe sequence
tgatatttacctgtataccttttta

SEQ ID NO: 2196 - DNA, 25 bp, artificial sequence
  antisense probe sequence
gctgtcattatttatgctaacactg

SEQ ID NO: 2197 - DNA, 25 bp, artificial sequence
  antisense probe sequence
gctaacactggttttgtgtccctgg

SEQ ID NO: 2198 - DNA, 25 bp, artificial sequence
  antisense probe sequence
gtgtccctggaatctatctatctaa

SEQ ID NO: 2199 - DNA, 25 bp, artificial sequence
  antisense probe sequence
ttttccattttccagtacctattag

SEQ ID NO: 2200 - DNA, 25 bp, artificial sequence
  antisense probe sequence
agacagaatggctttcaattttttc

SEQ ID NO: 2201 - DNA, 25 bp, artificial sequence
  antisense probe sequence
tttctcttacttccaaacttagtca

SEQ ID NO: 2202 - DNA, 25 bp, artificial sequence
  antisense probe sequence
attttctagttttcattctgtacat

SEQ ID NO: 2203 - DNA, 25 bp, artificial sequence
  antisense probe sequence
cctttcaatgtgtggtatcagctgg

SEQ ID NO: 2204 - DNA, 25 bp, artificial sequence
  antisense probe sequence
tatcagctggactcagtaacacccc

SEQ ID NO: 2205 - DNA, 25 bp, artificial sequence
  antisense probe sequence
tttcttcagctggggatggggaatg

SEQ ID NO: 2206 - DNA, 25 bp, artificial sequence
  antisense probe sequence
taaaagccttcctttcacagtttct

SEQ ID NO: 2207 - DNA, 25 bp, artificial sequence
  antisense probe sequence
tcacagtttctggcatcactaccac

SEQ ID NO: 2208 - DNA, 25 bp, artificial sequence
  antisense probe sequence
ttatcatcatctgctttattcacat

SEQ ID NO: 2209 - DNA, 25 bp, artificial sequence
  antisense probe sequence
attaagtggcttcgtcattgtcctt

SEQ ID NO: 2210 - DNA, 25 bp, artificial sequence
  antisense probe sequence
tcattgtccttctacctcaaagata

SEQ ID NO: 2211 - DNA, 25 bp, artificial sequence
  antisense probe sequence
atctcttttgagtctttgctgtttg

SEQ ID NO: 2212 - DNA, 25 bp, artificial sequence
  antisense probe sequence
ttgttcagcatgggtgaccaccaga

SEQ ID NO: 2213 - DNA, 25 bp, artificial sequence
  antisense probe sequence
cagcctagccttcaagtggtgtgag

SEQ ID NO: 2214 - DNA, 25 bp, artificial sequence
  antisense probe sequence
ggtgtgagcggcctgagtggataca

SEQ ID NO: 2215 - DNA, 25 bp, artificial sequence
  antisense probe sequence
agtggatacacgtggatagccggcc

SEQ ID NO: 2216 - DNA, 25 bp, artificial sequence
  antisense probe sequence
tgcctccctgagccgtgactcaggg

SEQ ID NO: 2217 - DNA, 25 bp, artificial sequence
  antisense probe sequence
ctatgcccaggtgcgtcgggcacag

SEQ ID NO: 2218 - DNA, 25 bp, artificial sequence
  antisense probe sequence
agaagatagcctgccttgtgctggc

SEQ ID NO: 2219 - DNA, 25 bp, artificial sequence
  antisense probe sequence
tcagcctcttctacattttcaattt

SEQ ID NO: 2220 - DNA, 25 bp, artificial sequence
  antisense probe sequence
ctcgtgccctgggcagtgcacatgt

SEQ ID NO: 2221 - DNA, 25 bp, artificial sequence
  antisense probe sequence
ggcagtgcacatgttcagtgcccag

SEQ ID NO: 2222 - DNA, 25 bp, artificial sequence
  antisense probe sequence
cacaaagccaacactctgtgaccac

SEQ ID NO: 2223 - DNA, 25 bp, artificial sequence
  antisense probe sequence
gccccaaagatgggccttctctctc

SEQ ID NO: 2224 - DNA, 25 bp, artificial sequence
  antisense probe sequence
ttctcactctacagggtcctggtga

SEQ ID NO: 2225 - DNA, 25 bp, artificial sequence
  antisense probe sequence
tgaagagccagtgaggcccctggta

SEQ ID NO: 2226 - DNA, 25 bp, artificial sequence
  antisense probe sequence
tgcaggggcagcacagctggggtgc

SEQ ID NO: 2227 - DNA, 25 bp, artificial sequence
  antisense probe sequence
tctgcagcggggccttatgctgcca

SEQ ID NO: 2228 - DNA, 25 bp, artificial sequence
  antisense probe sequence
ggcaggtggctgagcaggagctccc

SEQ ID NO: 2229 - DNA, 25 bp, artificial sequence
  antisense probe sequence
cacccctgggcatcatgtgtgtggg

SEQ ID NO: 2230 - DNA, 25 bp, artificial sequence
  antisense probe sequence
caggtgtgggagctggtgaccccag

SEQ ID NO: 2231 - DNA, 25 bp, artificial sequence
  antisense probe sequence
agacccagaattctcagggctctac

SEQ ID NO: 2232 - DNA, 25 bp, artificial sequence
  antisense probe sequence
ctttcctggtcctaggtggccagtg

SEQ ID NO: 2233 - DNA, 25 bp, artificial sequence
  antisense probe sequence
gccgtttccgtggttgtagcagagg

SEQ ID NO: 2234 - DNA, 25 bp, artificial sequence
  antisense probe sequence
gaggaccggaggttgggttcctgat

SEQ ID NO: 2235 - DNA, 25 bp, artificial sequence
  antisense probe sequence
ctggcctacgtgttcaattttctat

SEQ ID NO: 2236 - DNA, 25 bp, artificial sequence
  antisense probe sequence
caaaggctttagtccttgacccagg

SEQ ID NO: 2237 - DNA, 25 bp, artificial sequence
  antisense probe sequence
ccagggctaaagtggtctgtccaag

SEQ ID NO: 2238 - DNA, 25 bp, artificial sequence
  antisense probe sequence
aagtggtctgtccaagctgttgttg

SEQ ID NO: 2239 - DNA, 25 bp, artificial sequence
  antisense probe sequence
gtggtgtattcaagcagtagggttt

SEQ ID NO: 2240 - DNA, 25 bp, artificial sequence
  antisense probe sequence
tttttgtctgactacattaaagata

SEQ ID NO: 2241 - DNA, 25 bp, artificial sequence
  antisense probe sequence
agactgactatatttatacaacaga

SEQ ID NO: 2242 - DNA, 25 bp, artificial sequence
  antisense probe sequence
tcagctttgtgaaatcgaatttttt

SEQ ID NO: 2243 - DNA, 25 bp, artificial sequence
  antisense probe sequence
tcctttttaccctgtaatccaagcg

SEQ ID NO: 2244 - DNA, 25 bp, artificial sequence
  antisense probe sequence
taccctgtaatccaagcgttaatag

SEQ ID NO: 2245 - DNA, 25 bp, artificial sequence
  antisense probe sequence
gaagatgggttattgcatgtcactt

SEQ ID NO: 2246 - DNA, 25 bp, artificial sequence
  antisense probe sequence
tctgggtttagggctagccctgcct

SEQ ID NO: 2247 - DNA, 25 bp, artificial sequence
  antisense probe sequence
tctagctctgacagcctagaagtcc

SEQ ID NO: 2248 - DNA, 25 bp, artificial sequence
  antisense probe sequence
gggtgaatgagcttgtcaatgtgat

SEQ ID NO: 2249 - DNA, 25 bp, artificial sequence
  antisense probe sequence
ggaatctaaatgaagccagccctcg

SEQ ID NO: 2250 - DNA, 25 bp, artificial sequence
  antisense probe sequence
taaatgaagccagccctcggtatct

SEQ ID NO: 2251 - DNA, 25 bp, artificial sequence
  antisense probe sequence
tcggtatctgcaggtttctcatcca

SEQ ID NO: 2252 - DNA, 25 bp, artificial sequence
  antisense probe sequence
gatggttacatccgtattgaacatg

SEQ ID NO: 2253 - DNA, 25 bp, artificial sequence
  antisense probe sequence
caagaactctttatgtagcatttac

SEQ ID NO: 2254 - DNA, 25 bp, artificial sequence
  antisense probe sequence
gtcagttatatgcaaattctgtacc

SEQ ID NO: 2255 - DNA, 25 bp, artificial sequence
  antisense probe sequence
gtatcagggaattgagcatcttcag

SEQ ID NO: 2256 - DNA, 25 bp, artificial sequence
  antisense probe sequence
tgagcatcttcagatgttggtatct

SEQ ID NO: 2257 - DNA, 25 bp, artificial sequence
  antisense probe sequence
tcagagtggtttcattgccttccta

SEQ ID NO: 2258 - DNA, 25 bp, artificial sequence
  antisense probe sequence
taatggcccctccatttatttgact

SEQ ID NO: 2259 - DNA, 25 bp, artificial sequence
  antisense probe sequence
aaagcatcacacagtggcactagca

SEQ ID NO: 2260 - DNA, 25 bp, artificial sequence
  antisense probe sequence
aatacagtgctttatggctctaaca

SEQ ID NO: 2261 - DNA, 25 bp, artificial sequence
  antisense probe sequence
tccccgctcctaatggtacgtgggt

SEQ ID NO: 2262 - DNA, 25 bp, artificial sequence
  antisense probe sequence
tacctccctatcagttctagcatag

SEQ ID NO: 2263 - DNA, 25 bp, artificial sequence
  antisense probe sequence
gggttttcctagtatacccactgca

SEQ ID NO: 2264 - DNA, 25 bp, artificial sequence
  antisense probe sequence
gctgcttccaggtatgggacctgct

SEQ ID NO: 2265 - DNA, 25 bp, artificial sequence
  antisense probe sequence
gggacctgctaagtgtggaattacc

SEQ ID NO: 2266 - DNA, 25 bp, artificial sequence
  antisense probe sequence
acaaggagggcctctggtgttcctg

SEQ ID NO: 2267 - DNA, 25 bp, artificial sequence
  antisense probe sequence
gctgcccacaagccataaaccaata

SEQ ID NO: 2268 - DNA, 25 bp, artificial sequence
  antisense probe sequence
aacatgctcacatacacagatcttt

SEQ ID NO: 2269 - DNA, 25 bp, artificial sequence
  antisense probe sequence
tttccttactagacctctctttagt

SEQ ID NO: 2270 - DNA, 25 bp, artificial sequence
  antisense probe sequence
tggtctttgggaggagtctagtaca

SEQ ID NO: 2271 - DNA, 25 bp, artificial sequence
  antisense probe sequence
gaatttattttcatggctgttgtca

SEQ ID NO: 2272 - DNA, 25 bp, artificial sequence
  antisense probe sequence
atcagaactctccttaaaatgcatt

SEQ ID NO: 2273 - DNA, 25 bp, artificial sequence
  antisense probe sequence
atcagaagcaaagtacacccattat

SEQ ID NO: 2274 - DNA, 25 bp, artificial sequence
  antisense probe sequence
tgagtagtataagccacctattttt

SEQ ID NO: 2275 - DNA, 25 bp, artificial sequence
  antisense probe sequence
ctatttttacttccttctctgaaat

SEQ ID NO: 2276 - DNA, 25 bp, artificial sequence
  antisense probe sequence
attccagttaactcagcttgggttc

SEQ ID NO: 2277 - DNA, 25 bp, artificial sequence
  antisense probe sequence
ctcctctcttcctatagaacactgt

SEQ ID NO: 2278 - DNA, 25 bp, artificial sequence
  antisense probe sequence
agaacactgtgcataccttgaataa

SEQ ID NO: 2279 - DNA, 25 bp, artificial sequence
  antisense probe sequence
gagacacatgatgatttgcattgta

SEQ ID NO: 2280 - DNA, 25 bp, artificial sequence
  antisense probe sequence
aaagtgtgtttgtacccatgagttc

SEQ ID NO: 2281 - DNA, 25 bp, artificial sequence
  antisense probe sequence
acccatgagttcagcatttctgcca

SEQ ID NO: 2282 - DNA, 25 bp, artificial sequence
  antisense probe sequence
gatgcatggttgcatccttttcctt

SEQ ID NO: 2283 - DNA, 25 bp, artificial sequence
  antisense probe sequence
tttccttctgaccaacacttagtct

SEQ ID NO: 2284 - DNA, 25 bp, artificial sequence
  antisense probe sequence
gaccaacacttagtctttaactttg

SEQ ID NO: 2285 - DNA, 25 bp, artificial sequence
  antisense probe sequence
aaggtttcagggttagcactatagt

SEQ ID NO: 2286 - DNA, 25 bp, artificial sequence
  antisense probe sequence
ctatagttttggttcattttctcat

SEQ ID NO: 2287 - DNA, 25 bp, artificial sequence
  antisense probe sequence
tgaattgaactgcctttcattatct

SEQ ID NO: 2288 - DNA, 25 bp, artificial sequence
  antisense probe sequence
gtatggttgcttttgccatggttgc

SEQ ID NO: 2289 - DNA, 25 bp, artificial sequence
  antisense probe sequence
ccatggttgcttttactattaataa

SEQ ID NO: 2290 - DNA, 25 bp, artificial sequence
  antisense probe sequence
ttgtgaaccatttaacccttttgat

SEQ ID NO: 2291 - DNA, 25 bp, artificial sequence
  antisense probe sequence
acctctgcatcagttgcttctatag

SEQ ID NO: 2292 - DNA, 25 bp, artificial sequence
  antisense probe sequence
gcttctatagagcatcagccctcat

SEQ ID NO: 2293 - DNA, 25 bp, artificial sequence
  antisense probe sequence
attgtcttaatgtcggggagcagcc

SEQ ID NO: 2294 - DNA, 25 bp, artificial sequence
  antisense probe sequence
cccaggtgtccgcatttttgcatgg

SEQ ID NO: 2295 - DNA, 25 bp, artificial sequence
  antisense probe sequence
ggaaaaggcttacttgcccttcagc

SEQ ID NO: 2296 - DNA, 25 bp, artificial sequence
  antisense probe sequence
gtgctattcacagtaccatgcgagt

SEQ ID NO: 2297 - DNA, 25 bp, artificial sequence
  antisense probe sequence
cgagtagcccacagttaattcccgg

SEQ ID NO: 2298 - DNA, 25 bp, artificial sequence
  antisense probe sequence
aattcccggcagattctttggctgt

SEQ ID NO: 2299 - DNA, 25 bp, artificial sequence
  antisense probe sequence
taagatgcttagggtgcctggccag

SEQ ID NO: 2300 - DNA, 25 bp, artificial sequence
  antisense probe sequence
ctccgtggtttcctgttgtgacagt

SEQ ID NO: 2301 - DNA, 25 bp, artificial sequence
  antisense probe sequence
atgagtctacctcacctatattgca

SEQ ID NO: 2302 - DNA, 25 bp, artificial sequence
  antisense probe sequence
gcactctggcagaagtatttcccac

SEQ ID NO: 2303 - DNA, 25 bp, artificial sequence
  antisense probe sequence
cacatttaattattgcctccccaaa

SEQ ID NO: 2304 - DNA, 25 bp, artificial sequence
  antisense probe sequence
cccatactaaatcctagcctcgtag

SEQ ID NO: 2305 - DNA, 25 bp, artificial sequence
  antisense probe sequence
atcctagcctcgtagaagtctggtc

SEQ ID NO: 2306 - DNA, 25 bp, artificial sequence
  antisense probe sequence
aagtctggtctaatgtgtcagcagt

SEQ ID NO: 2307 - DNA, 25 bp, artificial sequence
  antisense probe sequence
ggtaatctactagctctgatccata

SEQ ID NO: 2308 - DNA, 25 bp, artificial sequence
  antisense probe sequence
atcaggagattccctgtccttgatt

SEQ ID NO: 2309 - DNA, 25 bp, artificial sequence
  antisense probe sequence
ttttcctttatataaccggctaatg

SEQ ID NO: 2310 - DNA, 25 bp, artificial sequence
  antisense probe sequence
tgggcaggccatattggtctatgta

SEQ ID NO: 2311 - DNA, 25 bp, artificial sequence
  antisense probe sequence
acatgctttgttttgcctgtcaagg

SEQ ID NO: 2312 - DNA, 25 bp, artificial sequence
  antisense probe sequence
cgatctcggtcgttcatctttaaat

SEQ ID NO: 2313 - DNA, 25 bp, artificial sequence
  antisense probe sequence
gccaaggaatgctctggcccaggag

SEQ ID NO: 2314 - DNA, 25 bp, artificial sequence
  antisense probe sequence
gacgctgtgatctgcagcaggcttc

SEQ ID NO: 2315 - DNA, 25 bp, artificial sequence
  antisense probe sequence
ccatataccacgttgctgactcacg

SEQ ID NO: 2316 - DNA, 25 bp, artificial sequence
  antisense probe sequence
ttaaaccaccactcttaggtctgct

SEQ ID NO: 2317 - DNA, 25 bp, artificial sequence
  antisense probe sequence
taggtctgctcactcttagaacaca

SEQ ID NO: 2318 - DNA, 25 bp, artificial sequence
  antisense probe sequence
ttgttttcactcattgtggtcccca

SEQ ID NO: 2319 - DNA, 25 bp, artificial sequence
  antisense probe sequence
gacactagttgcctagagtcccact

SEQ ID NO: 2320 - DNA, 25 bp, artificial sequence
  antisense probe sequence
gtcccactgtgagtcatggtcagcc

SEQ ID NO: 2321 - DNA, 25 bp, artificial sequence
  antisense probe sequence
tggtcagcctgtctgacatccaggt

SEQ ID NO: 2322 - DNA, 25 bp, artificial sequence
  antisense probe sequence
ggaggcttagatgacttctgcagga

SEQ ID NO: 2323 - DNA, 25 bp, artificial sequence
  antisense probe sequence
ttatctttatccaacatttctccaa

SEQ ID NO: 2324 - DNA, 25 bp, artificial sequence
  antisense probe sequence
gtgtattataacaatccctttccca

SEQ ID NO: 2325 - DNA, 25 bp, artificial sequence
  antisense probe sequence
acaatccctttcccagaattagttg

SEQ ID NO: 2326 - DNA, 25 bp, artificial sequence
  antisense probe sequence
gaattagttgtatagggttggccca

SEQ ID NO: 2327 - DNA, 25 bp, artificial sequence
  antisense probe sequence
agaaaaatctcgcattgctccctaa

SEQ ID NO: 2328 - DNA, 25 bp, artificial sequence
  antisense probe sequence
gcaacttctatttccagtcggggga

SEQ ID NO: 2329 - DNA, 25 bp, artificial sequence
  antisense probe sequence
gtgttccaaagctttttcaaactag

SEQ ID NO: 2330 - DNA, 25 bp, artificial sequence
  antisense probe sequence
gagatactgatgtccacagttcatt

SEQ ID NO: 2331 - DNA, 25 bp, artificial sequence
  antisense probe sequence
gttcattggcagaatctaacccctt

SEQ ID NO: 2332 - DNA, 25 bp, artificial sequence
  antisense probe sequence
gctcttgcagtccaaagggatacct

SEQ ID NO: 2333 - DNA, 25 bp, artificial sequence
  antisense probe sequence
aacatctcagacgcaaaaattacat

SEQ ID NO: 2334 - DNA, 25 bp, artificial sequence
  antisense probe sequence
tgcctgtagcattccagagctcact

SEQ ID NO: 2335 - DNA, 25 bp, artificial sequence
  antisense probe sequence
ctcactctgtctgccaggtatgaga

SEQ ID NO: 2336 - DNA, 25 bp, artificial sequence
  antisense probe sequence
agaagaacacgtaagaccgccacca

SEQ ID NO: 2337 - DNA, 25 bp, artificial sequence
  antisense probe sequence
ctgcccccagaacttttggatactg

SEQ ID NO: 2338 - DNA, 25 bp, artificial sequence
  antisense probe sequence
ggaggcagttgcataggtctccctc

SEQ ID NO: 2339 - DNA, 25 bp, artificial sequence
  antisense probe sequence
gcccaagactactctgggcagctcc

SEQ ID NO: 2340 - DNA, 25 bp, artificial sequence
  antisense probe sequence
ggaaaggatttctacagtgttctat

SEQ ID NO: 2341 - DNA, 25 bp, artificial sequence
  antisense probe sequence
agagagagtgggtttgggaagagtg

SEQ ID NO: 2342 - DNA, 25 bp, artificial sequence
  antisense probe sequence
gttggggagaggggaccgatgtgcc

SEQ ID NO: 2343 - DNA, 25 bp, artificial sequence
  antisense probe sequence
gaccgatgtgcctcattgtttagtg

SEQ ID NO: 2344 - DNA, 25 bp, artificial sequence
  antisense probe sequence
ttctggataaagtttggttgtttgc

SEQ ID NO: 2345 - DNA, 25 bp, artificial sequence
  antisense probe sequence
gaagcctgacaccttcagggaccag

SEQ ID NO: 2346 - DNA, 25 bp, artificial sequence
  antisense probe sequence
gaccagctccaggagctctgcatcc

SEQ ID NO: 2347 - DNA, 25 bp, artificial sequence
  antisense probe sequence
ttgattctgtggcccagcagcaggg

SEQ ID NO: 2348 - DNA, 25 bp, artificial sequence
  antisense probe sequence
ctgccgcatgttgctgactttcggt

SEQ ID NO: 2349 - DNA, 25 bp, artificial sequence
  antisense probe sequence
gagcgtcctgatgcagctgaagctt

SEQ ID NO: 2350 - DNA, 25 bp, artificial sequence
  antisense probe sequence
tgggtcagcataccgctttgaggtc

SEQ ID NO: 2351 - DNA, 25 bp, artificial sequence
  antisense probe sequence
gccaagttccaggagctgcggtaca

SEQ ID NO: 2352 - DNA, 25 bp, artificial sequence
  antisense probe sequence
tcacttgaccagtcccattcagatc

SEQ ID NO: 2353 - DNA, 25 bp, artificial sequence
  antisense probe sequence
ggtgccaaagtgcagctgactcttc

SEQ ID NO: 2354 - DNA, 25 bp, artificial sequence
  antisense probe sequence
ttcccatgaggcaggctcttcagtg

SEQ ID NO: 2355 - DNA, 25 bp, artificial sequence
  antisense probe sequence
gagctatgcctttttttctttttgg

SEQ ID NO: 2356 - DNA, 25 bp, artificial sequence
  antisense probe sequence
agaggcctgccgaggggaggagcct

SEQ ID NO: 2357 - DNA, 25 bp, artificial sequence
  antisense probe sequence
gtccacccgtcagcagtgtgaagtc

SEQ ID NO: 2358 - DNA, 25 bp, artificial sequence
  antisense probe sequence
aagtctgttgtgtttgagcttctca

SEQ ID NO: 2359 - DNA, 25 bp, artificial sequence
  antisense probe sequence
ctcagagtggaatgactccttttcc

SEQ ID NO: 2360 - DNA, 25 bp, artificial sequence
  antisense probe sequence
cccgggtgatgtctgcaaagtctgt

SEQ ID NO: 2361 - DNA, 25 bp, artificial sequence
  antisense probe sequence
tgtctgcaaagtctgtgctgtccgt

SEQ ID NO: 2362 - DNA, 25 bp, artificial sequence
  antisense probe sequence
gctgggagagctatctggggagggg

SEQ ID NO: 2363 - DNA, 25 bp, artificial sequence
  antisense probe sequence
cgagcagaatacaccccagagttag

SEQ ID NO: 2364 - DNA, 25 bp, artificial sequence
  antisense probe sequence
cagagttagggtttgcgactccgcc

SEQ ID NO: 2365 - DNA, 25 bp, artificial sequence
  antisense probe sequence
ttgactgcttaggaggcgcgacgca

SEQ ID NO: 2366 - DNA, 25 bp, artificial sequence
  antisense probe sequence
ctgggaaggttgagagctgagacgg

SEQ ID NO: 2367 - DNA, 25 bp, artificial sequence
  antisense probe sequence
tgttggagcgcagggacctgtggcg

SEQ ID NO: 2368 - DNA, 25 bp, artificial sequence
  antisense probe sequence
aaccagcggctggaaacactgacca

SEQ ID NO: 2369 - DNA, 25 bp, artificial sequence
  antisense probe sequence
tggaaacactgaccaagctgctcca

SEQ ID NO: 2370 - DNA, 25 bp, artificial sequence
  antisense probe sequence
gagccagctgctgcgtgagctggta

SEQ ID NO: 2371 - DNA, 25 bp, artificial sequence
  antisense probe sequence
ctgctggggcagactcactgagagc

SEQ ID NO: 2372 - DNA, 25 bp, artificial sequence
  antisense probe sequence
gccatcaagatcttttctcggccca

SEQ ID NO: 2373 - DNA, 25 bp, artificial sequence
  antisense probe sequence
ttcgtgaagatggacgactgagccc

SEQ ID NO: 2374 - DNA, 25 bp, artificial sequence
  antisense probe sequence
gcaaggagctccatgctgaggatcg

SEQ ID NO: 2375 - DNA, 25 bp, artificial sequence
  antisense probe sequence
atgctgaggatcgccacatggctgc

SEQ ID NO: 2376 - DNA, 25 bp, artificial sequence
  antisense probe sequence
ggatcgccacatggctgcaaaggac

SEQ ID NO: 2377 - DNA, 25 bp, artificial sequence
  antisense probe sequence
ggacccaatcccagagcagaggtct

SEQ ID NO: 2378 - DNA, 25 bp, artificial sequence
  antisense probe sequence
caaagtcatctgaacttccgtttcc

SEQ ID NO: 2379 - DNA, 25 bp, artificial sequence
  antisense probe sequence
tatcaaggtgctaaggcccgggtgg

SEQ ID NO: 2380 - DNA, 25 bp, artificial sequence
  antisense probe sequence
ggtgctgcctttacaaacacctgca

SEQ ID NO: 2381 - DNA, 25 bp, artificial sequence
  antisense probe sequence
ccaggctttagagccctcagcaggt

SEQ ID NO: 2382 - DNA, 25 bp, artificial sequence
  antisense probe sequence
ccctcagcaggtctggggagctaga

SEQ ID NO: 2383 - DNA, 25 bp, artificial sequence
  antisense probe sequence
caaaggagggacctcaggccttccg

SEQ ID NO: 2384 - DNA, 25 bp, artificial sequence
  antisense probe sequence
ccttctccccagagggaggcggcct

SEQ ID NO: 2385 - DNA, 25 bp, artificial sequence
  antisense probe sequence
ccattggtgctcatgcagactctgg

SEQ ID NO: 2386 - DNA, 25 bp, artificial sequence
  antisense probe sequence
gccgagggagccgtggctccatggc

SEQ ID NO: 2387 - DNA, 25 bp, artificial sequence
  antisense probe sequence
ggctccatggccagatgacggaaac

SEQ ID NO: 2388 - DNA, 25 bp, artificial sequence
  antisense probe sequence
aagacctgtgctataaaccaccctg

SEQ ID NO: 2389 - DNA, 25 bp, artificial sequence
  antisense probe sequence
tttagcagtgcctgtgacgcattcc

SEQ ID NO: 2390 - DNA, 25 bp, artificial sequence
  antisense probe sequence
gctgacctggattcttccaatatgc

SEQ ID NO: 2391 - DNA, 25 bp, artificial sequence
  antisense probe sequence
acacttcctctaaaagagccccagg

SEQ ID NO: 2392 - DNA, 25 bp, artificial sequence
  antisense probe sequence
caggagtccatctggaggctgaccc

SEQ ID NO: 2393 - DNA, 25 bp, artificial sequence
  antisense probe sequence
aaaatgctactcaaaagccctctcc

SEQ ID NO: 2394 - DNA, 25 bp, artificial sequence
  antisense probe sequence
cacaggatctcctctaggcattgat

SEQ ID NO: 2395 - DNA, 25 bp, artificial sequence
  antisense probe sequence
agaactactcaactgtgtggtaaca

SEQ ID NO: 2396 - DNA, 25 bp, artificial sequence
  antisense probe sequence
taccaatttccccaactatgttgca

SEQ ID NO: 2397 - DNA, 25 bp, artificial sequence
  antisense probe sequence
gaatgcatgttttcattgccttctc

SEQ ID NO: 2398 - DNA, 25 bp, artificial sequence
  antisense probe sequence
gtacgtttgtgtgttcatcacctta

SEQ ID NO: 2399 - DNA, 25 bp, artificial sequence
  antisense probe sequence
ctctggagcccataatatctacata

SEQ ID NO: 2400 - DNA, 25 bp, artificial sequence
  antisense probe sequence
aaaatactggacccacttctttcag

SEQ ID NO: 2401 - DNA, 25 bp, artificial sequence
  antisense probe sequence
gaagataccttatatgccctaaagt

SEQ ID NO: 2402 - DNA, 25 bp, artificial sequence
  antisense probe sequence
gccctaaagttaataccagcagtca

SEQ ID NO: 2403 - DNA, 25 bp, artificial sequence
  antisense probe sequence
ggctgtgacacttctttgtggtact

SEQ ID NO: 2404 - DNA, 25 bp, artificial sequence
  antisense probe sequence
accctttgcagaagattcccttgta

SEQ ID NO: 2405 - DNA, 25 bp, artificial sequence
  antisense probe sequence
ttcccttgtaaatggccctgtggca

SEQ ID NO: 2406 - DNA, 25 bp, artificial sequence
  antisense probe sequence
ggcatgcccagtatctgcaatgttc

SEQ ID NO: 2407 - DNA, 25 bp, artificial sequence
  antisense probe sequence
ggcaaacctctctgtttgccaagcc

SEQ ID NO: 2408 - DNA, 25 bp, artificial sequence
  antisense probe sequence
gtttgccaagcctgcagagttgaac

SEQ ID NO: 2409 - DNA, 25 bp, artificial sequence
  antisense probe sequence
tacaatctgaccctgttttttggcc

SEQ ID NO: 2410 - DNA, 25 bp, artificial sequence
  antisense probe sequence
ccctgtttctggacactgtagctga

SEQ ID NO: 2411 - DNA, 25 bp, artificial sequence
  antisense probe sequence
cggaactacatgccctaggatataa

SEQ ID NO: 2412 - DNA, 25 bp, artificial sequence
  antisense probe sequence
agtcctgtccagaagatacatgctt

SEQ ID NO: 2413 - DNA, 25 bp, artificial sequence
  antisense probe sequence
catgcttcctggcctgattgaggag

SEQ ID NO: 2414 - DNA, 25 bp, artificial sequence
  antisense probe sequence
acaaggtgttgtggtcttccatcca

SEQ ID NO: 2415 - DNA, 25 bp, artificial sequence
  antisense probe sequence
tccatccagtttcttaagtgctgat

SEQ ID NO: 2416 - DNA, 25 bp, artificial sequence
  antisense probe sequence
caccttgacctggcctacagaagta

SEQ ID NO: 2417 - DNA, 25 bp, artificial sequence
  antisense probe sequence
tgcctcaggcgtgctttttgattca

SEQ ID NO: 2418 - DNA, 25 bp, artificial sequence
  antisense probe sequence
gaatataccattctgggtcctgagg

SEQ ID NO: 2419 - DNA, 25 bp, artificial sequence
  antisense probe sequence
gagggcattagatcactgacagctg

SEQ ID NO: 2420 - DNA, 25 bp, artificial sequence
  antisense probe sequence
atttcaatgcctattctctgcaagg

SEQ ID NO: 2421 - DNA, 25 bp, artificial sequence
  antisense probe sequence
ttctctgcaaggtactatgtttcgt

SEQ ID NO: 2422 - DNA, 25 bp, artificial sequence
  antisense probe sequence
ttacaaggtttgtctattttcagtt

SEQ ID NO: 2423 - DNA, 25 bp, artificial sequence
  antisense probe sequence
agttctttactttttacatgctgac

SEQ ID NO: 2424 - DNA, 25 bp, artificial sequence
  antisense probe sequence
cactgcctaaatagatctctttcag

SEQ ID NO: 2425 - DNA, 25 bp, artificial sequence
  antisense probe sequence
caatcctcagataacgcatagcaaa

SEQ ID NO: 2426 - DNA, 25 bp, artificial sequence
  antisense probe sequence
gatttctcatgcaacagcttctcta

SEQ ID NO: 2427 - DNA, 25 bp, artificial sequence
  antisense probe sequence
cagcttctctaattataccttagaa

SEQ ID NO: 2428 - DNA, 25 bp, artificial sequence
  antisense probe sequence
tataccttagaaatgttctcctttt

SEQ ID NO: 2429 - DNA, 25 bp, artificial sequence
  antisense probe sequence
tttttatcatcaaatctgctcaaga

SEQ ID NO: 2430 - DNA, 25 bp, artificial sequence
  antisense probe sequence
tgaaaacagcttaacattttaccat

SEQ ID NO: 2431 - DNA, 25 bp, artificial sequence
  antisense probe sequence
atttctctaaatgtaggcctggctg

SEQ ID NO: 2432 - DNA, 25 bp, artificial sequence
  antisense probe sequence
ctaaatgtaggcctggctgggcttt

SEQ ID NO: 2433 - DNA, 25 bp, artificial sequence
  antisense probe sequence
tcaagaggtcatttgttccccatag

SEQ ID NO: 2434 - DNA, 25 bp, artificial sequence
  antisense probe sequence
ttccccatagcagcatatctcattt

SEQ ID NO: 2435 - DNA, 25 bp, artificial sequence
  antisense probe sequence
tttactactcaacattcattatact

SEQ ID NO: 2436 - DNA, 25 bp, artificial sequence
  antisense probe sequence
gacttagtcatgtggattgttagca

SEQ ID NO: 2437 - DNA, 25 bp, artificial sequence
  antisense probe sequence
gttagcagtgatctgcattctgtaa

SEQ ID NO: 2438 - DNA, 25 bp, artificial sequence
  antisense probe sequence
gaggtactttcccatgatgtaggca

SEQ ID NO: 2439 - DNA, 25 bp, artificial sequence
  antisense probe sequence
agtggtgccagtaagcgtagagcgg

SEQ ID NO: 2440 - DNA, 25 bp, artificial sequence
  antisense probe sequence
gggtttagcatttccagtgcagcat

SEQ ID NO: 2441 - DNA, 25 bp, artificial sequence
  antisense probe sequence
agtgcagcattatcagtgggccttt

SEQ ID NO: 2442 - DNA, 25 bp, artificial sequence
  antisense probe sequence
taaaatgacttctgctaagcaccca

SEQ ID NO: 2443 - DNA, 25 bp, artificial sequence
  antisense probe sequence
gttctgtgttggcttgtagatacta

SEQ ID NO: 2444 - DNA, 25 bp, artificial sequence
  antisense probe sequence
gcaccctgcggtttgcagggggctc

SEQ ID NO: 2445 - DNA, 25 bp, artificial sequence
  antisense probe sequence
cacccataattcttacccagagcat

SEQ ID NO: 2446 - DNA, 25 bp, artificial sequence
  antisense probe sequence
gcatggggttggggcggaaacctgg

SEQ ID NO: 2447 - DNA, 25 bp, artificial sequence
  antisense probe sequence
ccctcgccacggctagagaatctgg

SEQ ID NO: 2448 - DNA, 25 bp, artificial sequence
  antisense probe sequence
tggtggtgtccaaaatgtctgtcca

SEQ ID NO: 2449 - DNA, 25 bp, artificial sequence
  antisense probe sequence
ccctctggacctttcatagcagcag

SEQ ID NO: 2450 - DNA, 25 bp, artificial sequence
  antisense probe sequence
atgctttggggacaccgaggggact

SEQ ID NO: 2451 - DNA, 25 bp, artificial sequence
  antisense probe sequence
ccaccatggtgctattctggggctg

SEQ ID NO: 2452 - DNA, 25 bp, artificial sequence
  antisense probe sequence
gctcctggcctctggtagagtgaga

SEQ ID NO: 2453 - DNA, 25 bp, artificial sequence
  antisense probe sequence
gacttcagacgttctgatgccttcc

SEQ ID NO: 2454 - DNA, 25 bp, artificial sequence
  antisense probe sequence
ttctgatgccttccggatgtcatct

SEQ ID NO: 2455 - DNA, 25 bp, artificial sequence
  antisense probe sequence
aataaaactgtgatctcgtctagag

SEQ ID NO: 2456 - DNA, 25 bp, artificial sequence
  antisense probe sequence
aactgtgatctcgtctagagaaaat

SEQ ID NO: 2457 - DNA, 25 bp, artificial sequence
  antisense probe sequence
ttcatattacaaactgctcttccat

SEQ ID NO: 2458 - DNA, 25 bp, artificial sequence
  antisense probe sequence
tacaaactgctcttccatatttatg

SEQ ID NO: 2459 - DNA, 25 bp, artificial sequence
  antisense probe sequence
tttatgtaccatattataccttttt

SEQ ID NO: 2460 - DNA, 25 bp, artificial sequence
  antisense probe sequence
gatgttgaaacctgtttggcacctt

SEQ ID NO: 2461 - DNA, 25 bp, artificial sequence
  antisense probe sequence
tgttgaaacctgtttggcaccttct

SEQ ID NO: 2462 - DNA, 25 bp, artificial sequence
  antisense probe sequence
gtttggcaccttctggaagctacca

SEQ ID NO: 2463 - DNA, 25 bp, artificial sequence
  antisense probe sequence
ggcaccttctggaagctaccaaaaa

SEQ ID NO: 2464 - DNA, 25 bp, artificial sequence
  antisense probe sequence
aaaatgacactccattgaagtgctt

SEQ ID NO: 2465 - DNA, 25 bp, artificial sequence
  antisense probe sequence
gacactccattgaagtgcttaaaag

SEQ ID NO: 2466 - DNA, 25 bp, artificial sequence
  antisense probe sequence
gtctacttaagacttctggtcattt

SEQ ID NO: 2467 - DNA, 25 bp, artificial sequence
  antisense probe sequence
gacttctggtcatttccaacttata

SEQ ID NO: 2468 - DNA, 25 bp, artificial sequence
  antisense probe sequence
tccacatcaagtgttccattaaaag

SEQ ID NO: 2469 - DNA, 25 bp, artificial sequence
  antisense probe sequence
aagataaggcattctgagtgcaaac

SEQ ID NO: 2470 - DNA, 25 bp, artificial sequence
  antisense probe sequence
gagtgcaaacaaatgggggcttctt

SEQ ID NO: 2471 - DNA, 25 bp, artificial sequence
  antisense probe sequence
ggggcttcttaaactacacaccagc

SEQ ID NO: 2472 - DNA, 25 bp, artificial sequence
  antisense probe sequence
aactacacaccagcagtcagtgagg

SEQ ID NO: 2473 - DNA, 25 bp, artificial sequence
  antisense probe sequence
aattattgagttgctttcttgggtc

SEQ ID NO: 2474 - DNA, 25 bp, artificial sequence
  antisense probe sequence
gagttgctttcttgggtctctataa

SEQ ID NO: 2475 - DNA, 25 bp, artificial sequence
  antisense probe sequence
ctataatcaataacctgtctgcaga

SEQ ID NO: 2476 - DNA, 25 bp, artificial sequence
  antisense probe sequence
taacctgtctgcagatatctatcta

SEQ ID NO: 2477 - DNA, 25 bp, artificial sequence
  antisense probe sequence
gtgagagagaaaggtgctggcatag

SEQ ID NO: 2478 - DNA, 25 bp, artificial sequence
  antisense probe sequence
ggtgctggcataggatctgcccaga

SEQ ID NO: 2479 - DNA, 25 bp, artificial sequence
  antisense probe sequence
gctggcataggatctgcccagaaga

SEQ ID NO: 2480 - DNA, 25 bp, artificial sequence
  antisense probe sequence
gaagagaaaatgacccatgcgcagt

SEQ ID NO: 2481 - DNA, 25 bp, artificial sequence
  antisense probe sequence
atgacccatgcgcagttgggctctg

SEQ ID NO: 2482 - DNA, 25 bp, artificial sequence
  antisense probe sequence
tgcgcagttgggctctggatacggc

SEQ ID NO: 2483 - DNA, 25 bp, artificial sequence
  antisense probe sequence
tctggatacggcgctgtctatagca

SEQ ID NO: 2484 - DNA, 25 bp, artificial sequence
  antisense probe sequence
ggcgctgtctatagcaagttggcca

SEQ ID NO: 2485 - DNA, 25 bp, artificial sequence
  antisense probe sequence
ctatagcaagttggccagtctggcc

SEQ ID NO: 2486 - DNA, 25 bp, artificial sequence
  antisense probe sequence
ccctcttaaattgtggttgccatgg

SEQ ID NO: 2487 - DNA, 25 bp, artificial sequence
  antisense probe sequence
attgtggttgccatggtaccgaggg

SEQ ID NO: 2488 - DNA, 25 bp, artificial sequence
  antisense probe sequence
gactgttgttggttatctggtgtgg

SEQ ID NO: 2489 - DNA, 25 bp, artificial sequence
  antisense probe sequence
gtgcacttagcatgctgacttgctc

SEQ ID NO: 2490 - DNA, 25 bp, artificial sequence
  antisense probe sequence
gacttgctcatcagttttgcacagt

SEQ ID NO: 2491 - DNA, 25 bp, artificial sequence
  antisense probe sequence
ctccattggaaccccgaggacaaag

SEQ ID NO: 2492 - DNA, 25 bp, artificial sequence
  antisense probe sequence
cttcacatgatcactactgcagcag

SEQ ID NO: 2493 - DNA, 25 bp, artificial sequence
  antisense probe sequence
actgcagcagaatggtctatgtcat

SEQ ID NO: 2494 - DNA, 25 bp, artificial sequence
  antisense probe sequence
gttttttcctgacttacattcgtga

SEQ ID NO: 2495 - DNA, 25 bp, artificial sequence
  antisense probe sequence
ctgcaccttgccctattaacaatga

SEQ ID NO: 2496 - DNA, 25 bp, artificial sequence
  antisense probe sequence
tgaacgaacacggctactttccaga

SEQ ID NO: 2497 - DNA, 25 bp, artificial sequence
  antisense probe sequence
ttcaaccacttaatcaaggctgaca

SEQ ID NO: 2498 - DNA, 25 bp, artificial sequence
  antisense probe sequence
aacacctatgcctatacttttttat

SEQ ID NO: 2499 - DNA, 25 bp, artificial sequence
  antisense probe sequence
aagacattccactattatgcgtaat

SEQ ID NO: 2500 - DNA, 25 bp, artificial sequence
  antisense probe sequence
tatgcgtaatgctcagctttttgta

SEQ ID NO: 2501 - DNA, 25 bp, artificial sequence
  antisense probe sequence
aatttgttcttaatgcagccactat

SEQ ID NO: 2502 - DNA, 25 bp, artificial sequence
  antisense probe sequence
aatgcagccactataacttgataag

SEQ ID NO: 2503 - DNA, 25 bp, artificial sequence
  antisense probe sequence
aacttgataagtcattgcactattt

SEQ ID NO: 2504 - DNA, 25 bp, artificial sequence
  antisense probe sequence
cacccccaacaaagcactatcattt

SEQ ID NO: 2505 - DNA, 25 bp, artificial sequence
  antisense probe sequence
gggtattttctgtttcatgatgtat

SEQ ID NO: 2506 - DNA, 25 bp, artificial sequence
  antisense probe sequence
gagttcaggatctgcaattcagttc

SEQ ID NO: 2507 - DNA, 25 bp, artificial sequence
  antisense probe sequence
gcaattcagttcaacacaagtttgt

SEQ ID NO: 2508 - DNA, 25 bp, artificial sequence
  antisense probe sequence
tgtaaaataattcccttctcccatt

SEQ ID NO: 2509 - DNA, 25 bp, artificial sequence
  antisense probe sequence
ttccttgtctgccattctgaatatg

SEQ ID NO: 2510 - DNA, 25 bp, artificial sequence
  antisense probe sequence
cagagatctgtggggaagctccgcc

SEQ ID NO: 2511 - DNA, 25 bp, artificial sequence
  antisense probe sequence
ccagccacactccttgggataatac

SEQ ID NO: 2512 - DNA, 25 bp, artificial sequence
  antisense probe sequence
ataatactagccggttctgcctgat

SEQ ID NO: 2513 - DNA, 25 bp, artificial sequence
  antisense probe sequence
actcctctagtgagccttgactgtt

SEQ ID NO: 2514 - DNA, 25 bp, artificial sequence
  antisense probe sequence
caagccaagaggttgctgcagctgc

SEQ ID NO: 2515 - DNA, 25 bp, artificial sequence
  antisense probe sequence
gccagcccaatgacaccttgaagtc

SEQ ID NO: 2516 - DNA, 25 bp, artificial sequence
  antisense probe sequence
tttcttgcccgctaataaaacctat

SEQ ID NO: 2517 - DNA, 25 bp, artificial sequence
  antisense probe sequence
tccttggcattttgttgttccgatc

SEQ ID NO: 2518 - DNA, 25 bp, artificial sequence
  antisense probe sequence
ttgttccgatcacagatttccctgc

SEQ ID NO: 2519 - DNA, 25 bp, artificial sequence
  antisense probe sequence
gggtgtctgtggttatcagctgcag

SEQ ID NO: 2520 - DNA, 25 bp, artificial sequence
  antisense probe sequence
acgtgccctaccttagtgacgggag

SEQ ID NO: 2521 - DNA, 25 bp, artificial sequence
  antisense probe sequence
cctctggatattgatgcctcgggtg

SEQ ID NO: 2522 - DNA, 25 bp, artificial sequence
  antisense probe sequence
tggacaccgaatccagagtgccact

SEQ ID NO: 2523 - DNA, 25 bp, artificial sequence
  antisense probe sequence
cactgtgctcctcaacgaggacgtc

SEQ ID NO: 2524 - DNA, 25 bp, artificial sequence
  antisense probe sequence
gatgagaagactgctgaggctgcga

SEQ ID NO: 2525 - DNA, 25 bp, artificial sequence
  antisense probe sequence
tgaggctgcgatgcagcgcctcaaa

SEQ ID NO: 2526 - DNA, 25 bp, artificial sequence
  antisense probe sequence
aaagcggccaacattccagagcata

SEQ ID NO: 2527 - DNA, 25 bp, artificial sequence
  antisense probe sequence
gagcataacaccattggcttcatgt

SEQ ID NO: 2528 - DNA, 25 bp, artificial sequence
  antisense probe sequence
ggcttcatgtttgcatgcgttggca

SEQ ID NO: 2529 - DNA, 25 bp, artificial sequence
  antisense probe sequence
gttggcaggggctttcagtattaca

SEQ ID NO: 2530 - DNA, 25 bp, artificial sequence
  antisense probe sequence
tcccttattcggcttctttggaaat

SEQ ID NO: 2531 - DNA, 25 bp, artificial sequence
  antisense probe sequence
atggcactcatacatctggggtcat

SEQ ID NO: 2532 - DNA, 25 bp, artificial sequence
  antisense probe sequence
gcaccttacatatttgatgctcagg

SEQ ID NO: 2533 - DNA, 25 bp, artificial sequence
  antisense probe sequence
ccacccttacatctccatagttggt

SEQ ID NO: 2534 - DNA, 25 bp, artificial sequence
  antisense probe sequence
gttggtacagttagcttgtagcagc

SEQ ID NO: 2535 - DNA, 25 bp, artificial sequence
  antisense probe sequence
atgcctggagatcactgtctgttgg

SEQ ID NO: 2536 - DNA, 25 bp, artificial sequence
  antisense probe sequence
ctgtctgttggtctgatctcagtat

SEQ ID NO: 2537 - DNA, 25 bp, artificial sequence
  antisense probe sequence
cagtatcatactgagacacctcccc

SEQ ID NO: 2538 - DNA, 25 bp, artificial sequence
  antisense probe sequence
cctgagccttacctacttaaattgg

SEQ ID NO: 2539 - DNA, 25 bp, artificial sequence
  antisense probe sequence
gaggcaagttgcaagggagccagag

SEQ ID NO: 2540 - DNA, 25 bp, artificial sequence
  antisense probe sequence
aatttctttggcacattgacttact

SEQ ID NO: 2541 - DNA, 25 bp, artificial sequence
  antisense probe sequence
ggcacattgacttactgatatcttt

SEQ ID NO: 2542 - DNA, 25 bp, artificial sequence
  antisense probe sequence
tattccccggcgcaataaaaatgcc

SEQ ID NO: 2543 - DNA, 25 bp, artificial sequence
  antisense probe sequence
ttcccttcagtcttaaattgtctcc

SEQ ID NO: 2544 - DNA, 25 bp, artificial sequence
  antisense probe sequence
tgtaacccttgtgctgtgtattctc

SEQ ID NO: 2545 - DNA, 25 bp, artificial sequence
  antisense probe sequence
tctgctcactctcagggccaagcag

SEQ ID NO: 2546 - DNA, 25 bp, artificial sequence
  antisense probe sequence
ggccctctcttggccaaaatctgag

SEQ ID NO: 2547 - DNA, 25 bp, artificial sequence
  antisense probe sequence
ttggtaggtaggttctggctgcctg

SEQ ID NO: 2548 - DNA, 25 bp, artificial sequence
  antisense probe sequence
tgtccactccagcaagatccaggga

SEQ ID NO: 2549 - DNA, 25 bp, artificial sequence
  antisense probe sequence
gggatgatagccttgcagggccact

SEQ ID NO: 2550 - DNA, 25 bp, artificial sequence
  antisense probe sequence
tgggagtttgtgcccaagcttctcc

SEQ ID NO: 2551 - DNA, 25 bp, artificial sequence
  antisense probe sequence
gaagtatgattcctctgtcttcagt

SEQ ID NO: 2552 - DNA, 25 bp, artificial sequence
  antisense probe sequence
tcaggggcatcctgcccatagtacc

SEQ ID NO: 2553 - DNA, 25 bp, artificial sequence
  antisense probe sequence
tgaagcctagcactcatgcagctct

SEQ ID NO: 2554 - DNA, 25 bp, artificial sequence
  antisense probe sequence
agtgggggggtggtcagtggaagct

SEQ ID NO: 2555 - DNA, 25 bp, artificial sequence
  antisense probe sequence
agctggggaggcttcactcagctca

SEQ ID NO: 2556 - DNA, 25 bp, artificial sequence
  antisense probe sequence
tcactgctctctccatggggagggg

SEQ ID NO: 2557 - DNA, 25 bp, artificial sequence
  antisense probe sequence
cagggcaccaagttcgggatcctag

SEQ ID NO: 2558 - DNA, 25 bp, artificial sequence
  antisense probe sequence
ccccactctcaggctaggatggaga

SEQ ID NO: 2559 - DNA, 25 bp, artificial sequence
  antisense probe sequence
cccccccgcatacttgaatgtatgt

SEQ ID NO: 2560 - DNA, 25 bp, artificial sequence
  antisense probe sequence
gtatgtgcgtatttattgctcacgt

SEQ ID NO: 2561 - DNA, 25 bp, artificial sequence
  antisense probe sequence
atttattgctcacgtctgtgccatg

SEQ ID NO: 2562 - DNA, 25 bp, artificial sequence
  antisense probe sequence
tcacgtctgtgccatgttgtcaatg

SEQ ID NO: 2563 - DNA, 25 bp, artificial sequence
  antisense probe sequence
tgttgtcaatgggtcctttccaacc

SEQ ID NO: 2564 - DNA, 25 bp, artificial sequence
  antisense probe sequence
ctttccaacccaagaggtacatttg

SEQ ID NO: 2565 - DNA, 25 bp, artificial sequence
  antisense probe sequence
aggagacggacctgtgagtctgacc

SEQ ID NO: 2566 - DNA, 25 bp, artificial sequence
  antisense probe sequence
gttttgtcaggttgtccttgtttgg

SEQ ID NO: 2567 - DNA, 25 bp, artificial sequence
  antisense probe sequence
ccttgtttggatccctcaactaggt

SEQ ID NO: 2568 - DNA, 25 bp, artificial sequence
  antisense probe sequence
tggacgtgtttctttaacctcatcc

SEQ ID NO: 2569 - DNA, 25 bp, artificial sequence
  antisense probe sequence
accagagcttgggaccagggctcct

SEQ ID NO: 2570 - DNA, 25 bp, artificial sequence
  antisense probe sequence
aattttctctcctggtagctgaaca

SEQ ID NO: 2571 - DNA, 25 bp, artificial sequence
  antisense probe sequence
gaacaggctgccgtcagccagagtt

SEQ ID NO: 2572 - DNA, 25 bp, artificial sequence
  antisense probe sequence
gtttcccttgttgacaattgctctc

SEQ ID NO: 2573 - DNA, 25 bp, artificial sequence
  antisense probe sequence
attgctctccagttcctatgaaagc

SEQ ID NO: 2574 - DNA, 25 bp, artificial sequence
  antisense probe sequence
gaacacaaccatcttaggcctgagc

SEQ ID NO: 2575 - DNA, 25 bp, artificial sequence
  antisense probe sequence
tctgcttgccgaactttctcaataa

SEQ ID NO: 2576 - DNA, 25 bp, artificial sequence
  antisense probe sequence
ggtagtttctgaacctattgacatt

SEQ ID NO: 2577 - DNA, 25 bp, artificial sequence
  antisense probe sequence
ggatcatgtgccatattttgttagt

SEQ ID NO: 2578 - DNA, 25 bp, artificial sequence
  antisense probe sequence
aaccaaatgtgaacttcctgtctcc

SEQ ID NO: 2579 - DNA, 25 bp, artificial sequence
  antisense probe sequence
cctcagcactagtccatgccaggac

SEQ ID NO: 2580 - DNA, 25 bp, artificial sequence
  antisense probe sequence
catgccaggacaccagctgacaatt

SEQ ID NO: 2581 - DNA, 25 bp, artificial sequence
  antisense probe sequence
gctgacaatttcttggttttactgt

SEQ ID NO: 2582 - DNA, 25 bp, artificial sequence
  antisense probe sequence
gatcaattactgtcctcacttagaa

SEQ ID NO: 2583 - DNA, 25 bp, artificial sequence
  antisense probe sequence
gaacaaagcctgagtccgagaatat

SEQ ID NO: 2584 - DNA, 25 bp, artificial sequence
  antisense probe sequence
attttaccaatatatgcctgttaca

SEQ ID NO: 2585 - DNA, 25 bp, artificial sequence
  antisense probe sequence
aatatttaccgacattccttataca

SEQ ID NO: 2586 - DNA, 25 bp, artificial sequence
  antisense probe sequence
tgacagacacttggctacatgggaa

SEQ ID NO: 2587 - DNA, 25 bp, artificial sequence
  antisense probe sequence
ccagccggagtcgggcatcaagcga

SEQ ID NO: 2588 - DNA, 25 bp, artificial sequence
  antisense probe sequence
gtttagcttcttctcccgagataag

SEQ ID NO: 2589 - DNA, 25 bp, artificial sequence
  antisense probe sequence
tcccgagataagaagcgcctggcca

SEQ ID NO: 2590 - DNA, 25 bp, artificial sequence
  antisense probe sequence
ccgcgatgacggttacacagagcaa

SEQ ID NO: 2591 - DNA, 25 bp, artificial sequence
  antisense probe sequence
tcaagcctctcggtgcagatgcacc

SEQ ID NO: 2592 - DNA, 25 bp, artificial sequence
  antisense probe sequence
cagatgcaccctgaaaactgacccc

SEQ ID NO: 2593 - DNA, 25 bp, artificial sequence
  antisense probe sequence
aaactgacccctcaaacagactgtc

SEQ ID NO: 2594 - DNA, 25 bp, artificial sequence
  antisense probe sequence
tacccagggctatcactgtttctaa

SEQ ID NO: 2595 - DNA, 25 bp, artificial sequence
  antisense probe sequence
tagatgactctgatcccgtaggata

SEQ ID NO: 2596 - DNA, 25 bp, artificial sequence
  antisense probe sequence
gaggccagacttctgcgttaacttc

SEQ ID NO: 2597 - DNA, 25 bp, artificial sequence
  antisense probe sequence
aagccaaatacatcacttgccacta

SEQ ID NO: 2598 - DNA, 25 bp, artificial sequence
  antisense probe sequence
ctggccccgagcttagggatgtgct

SEQ ID NO: 2599 - DNA, 25 bp, artificial sequence
  antisense probe sequence
ggccccgagcttagggatgtgcttg

SEQ ID NO: 2600 - DNA, 25 bp, artificial sequence
  antisense probe sequence
gtgcttgcaaacccttctcaagggt

SEQ ID NO: 2601 - DNA, 25 bp, artificial sequence
  antisense probe sequence
ttctcaagggtctcacaaccccaac

SEQ ID NO: 2602 - DNA, 25 bp, artificial sequence
  antisense probe sequence
cccaacatcttcagactggcctgac

SEQ ID NO: 2603 - DNA, 25 bp, artificial sequence
  antisense probe sequence
caacatcttcagactggcctgacct

SEQ ID NO: 2604 - DNA, 25 bp, artificial sequence
  antisense probe sequence
taggaattttttaatggaccatcat

SEQ ID NO: 2605 - DNA, 25 bp, artificial sequence
  antisense probe sequence
ggaccatcatagggagggggtgctc

SEQ ID NO: 2606 - DNA, 25 bp, artificial sequence
  antisense probe sequence
catagggagggggtgctcctctttt

SEQ ID NO: 2607 - DNA, 25 bp, artificial sequence
  antisense probe sequence
ctcttttcccaccaggttgaggtgg

SEQ ID NO: 2608 - DNA, 25 bp, artificial sequence
  antisense probe sequence
ttgcatcgggggtccccagggtatg

SEQ ID NO: 2609 - DNA, 25 bp, artificial sequence
  antisense probe sequence
cttcctcgcagcaagcggctggaga

SEQ ID NO: 2610 - DNA, 25 bp, artificial sequence
  antisense probe sequence
cgtcgccgctgacctagagatggca

SEQ ID NO: 2611 - DNA, 25 bp, artificial sequence
  antisense probe sequence
acctagagatggcagccggtctcac

SEQ ID NO: 2612 - DNA, 25 bp, artificial sequence
  antisense probe sequence
cggtctcaccgacatatttcagcat

SEQ ID NO: 2613 - DNA, 25 bp, artificial sequence
  antisense probe sequence
gaatggcagactcatgtggctctat

SEQ ID NO: 2614 - DNA, 25 bp, artificial sequence
  antisense probe sequence
tactgggaactcgttgtcgaactga

SEQ ID NO: 2615 - DNA, 25 bp, artificial sequence
  antisense probe sequence
gcttttagtgactcgaggccaggca

SEQ ID NO: 2616 - DNA, 25 bp, artificial sequence
  antisense probe sequence
ccgccaccgtctgagcagaagtgca

SEQ ID NO: 2617 - DNA, 25 bp, artificial sequence
  antisense probe sequence
tcagagacagagggtctcctcccga

SEQ ID NO: 2618 - DNA, 25 bp, artificial sequence
  antisense probe sequence
ctctgccgctgttggggatatggtt

SEQ ID NO: 2619 - DNA, 25 bp, artificial sequence
  antisense probe sequence
gtataacctcgtattttagctccag

SEQ ID NO: 2620 - DNA, 25 bp, artificial sequence
  antisense probe sequence
ttaaccagcaagtttctgcttttta

SEQ ID NO: 2621 - DNA, 25 bp, artificial sequence
  antisense probe sequence
ataatttaatgtctctggcacacac

SEQ ID NO: 2622 - DNA, 25 bp, artificial sequence
  antisense probe sequence
cacacactaaaaaccatacacttca

SEQ ID NO: 2623 - DNA, 25 bp, artificial sequence
  antisense probe sequence
catacacttcagttgtgatctcagt

SEQ ID NO: 2624 - DNA, 25 bp, artificial sequence
  antisense probe sequence
gatgttcagttgaccaagtagttca

SEQ ID NO: 2625 - DNA, 25 bp, artificial sequence
  antisense probe sequence
gagtttgtgactgcagtgttcaaga

SEQ ID NO: 2626 - DNA, 25 bp, artificial sequence
  antisense probe sequence
agaactcagcatccttgttttctac

SEQ ID NO: 2627 - DNA, 25 bp, artificial sequence
  antisense probe sequence
attatcatgatcttcccatgccttt

SEQ ID NO: 2628 - DNA, 25 bp, artificial sequence
  antisense probe sequence
tgcctttgttgtacttgtgccgaag

SEQ ID NO: 2629 - DNA, 25 bp, artificial sequence
  antisense probe sequence
gtgttttgatattcctttgtctgga

SEQ ID NO: 2630 - DNA, 25 bp, artificial sequence
  antisense probe sequence
ttttgttcaccttggaatcaacagg

SEQ ID NO: 2631 - DNA, 25 bp, artificial sequence
  antisense probe sequence
aaaggattttgtggagtcgccccag

SEQ ID NO: 2632 - DNA, 25 bp, artificial sequence
  antisense probe sequence
gcctgacggcgttaattatccctgg

SEQ ID NO: 2633 - DNA, 25 bp, artificial sequence
  antisense probe sequence
taattatccctggctttcatcttga

SEQ ID NO: 2634 - DNA, 25 bp, artificial sequence
  antisense probe sequence
cttgatgctcttgcaggggaggctc

SEQ ID NO: 2635 - DNA, 25 bp, artificial sequence
  antisense probe sequence
gctcaagatgccttgtggctcgacc

SEQ ID NO: 2636 - DNA, 25 bp, artificial sequence
  antisense probe sequence
gttgaaaccttgatctgggcctgac

SEQ ID NO: 2637 - DNA, 25 bp, artificial sequence
  antisense probe sequence
tccagagggggagtcactgccacga

SEQ ID NO: 2638 - DNA, 25 bp, artificial sequence
  antisense probe sequence
cgaaggttgcccagaactttccttg

SEQ ID NO: 2639 - DNA, 25 bp, artificial sequence
  antisense probe sequence
ctgcaaaaagccccaagacttctcc

SEQ ID NO: 2640 - DNA, 25 bp, artificial sequence
  antisense probe sequence
ttgccatcgcgttctaaaagctgac

SEQ ID NO: 2641 - DNA, 25 bp, artificial sequence
  antisense probe sequence
caacactgttctccctgagtagggt

SEQ ID NO: 2642 - DNA, 25 bp, artificial sequence
  antisense probe sequence
ggaggcctgaatacaggcggtcacc

SEQ ID NO: 2643 - DNA, 25 bp, artificial sequence
  antisense probe sequence
ggcggtcacctaaggtggtgcgtac

SEQ ID NO: 2644 - DNA, 25 bp, artificial sequence
  antisense probe sequence
tggtgcgtacagtgttgggccacat

SEQ ID NO: 2645 - DNA, 25 bp, artificial sequence
  antisense probe sequence
gggccacatgtctagtggtgccagg

SEQ ID NO: 2646 - DNA, 25 bp, artificial sequence
  antisense probe sequence
gactgagagatcacttacctccacc

SEQ ID NO: 2647 - DNA, 25 bp, artificial sequence
  antisense probe sequence
gagactgatccacaatgttcctgag

SEQ ID NO: 2648 - DNA, 25 bp, artificial sequence
  antisense probe sequence
caatgttcctgaggtgtcttgggca

SEQ ID NO: 2649 - DNA, 25 bp, artificial sequence
  antisense probe sequence
gtgtcttgggcacccataggcaggt

SEQ ID NO: 2650 - DNA, 25 bp, artificial sequence
  antisense probe sequence
taggcaggtgacttctggcttaggg

SEQ ID NO: 2651 - DNA, 25 bp, artificial sequence
  antisense probe sequence
ggcttagggcagggttcaggaggct

SEQ ID NO: 2652 - DNA, 25 bp, artificial sequence
  antisense probe sequence
ctctttggtccccacagaacatgtt

SEQ ID NO: 2653 - DNA, 25 bp, artificial sequence
  antisense probe sequence
gtttgggttgtggaagcctatggta

SEQ ID NO: 2654 - DNA, 25 bp, artificial sequence
  antisense probe sequence
ggaagcctatggtattcttggctat

SEQ ID NO: 2655 - DNA, 25 bp, artificial sequence
  antisense probe sequence
tcttggctattgcagctgtggctct

SEQ ID NO: 2656 - DNA, 25 bp, artificial sequence
  antisense probe sequence
tgtggctctgtatgtgttacccaac

SEQ ID NO: 2657 - DNA, 25 bp, artificial sequence
  antisense probe sequence
tgtgttacccaacatgcgacagcag

SEQ ID NO: 2658 - DNA, 25 bp, artificial sequence
  antisense probe sequence
tgcgacagcaggagtcagagttctg

SEQ ID NO: 2659 - DNA, 25 bp, artificial sequence
  antisense probe sequence
agtcagagttctgcctcatggagtg

SEQ ID NO: 2660 - DNA, 25 bp, artificial sequence
  antisense probe sequence
tggagtgatggcagaccttggccag

SEQ ID NO: 2661 - DNA, 25 bp, artificial sequence
  antisense probe sequence
cagctttgggcaggacacactgtgc

SEQ ID NO: 2662 - DNA, 25 bp, artificial sequence
  antisense probe sequence
gaaaaggcttgtggggagcggctga

SEQ ID NO: 2663 - DNA, 25 bp, artificial sequence
  antisense probe sequence
tcctgccttgtgtaagaacctgagt

SEQ ID NO: 2664 - DNA, 25 bp, artificial sequence
  antisense probe sequence
tagcattagctttacttggagggga

SEQ ID NO: 2665 - DNA, 25 bp, artificial sequence
  antisense probe sequence
gatttgatgtattcttacttttcca

SEQ ID NO: 2666 - DNA, 25 bp, artificial sequence
  antisense probe sequence
gctggagaggcttatgggcaatatg

SEQ ID NO: 2667 - DNA, 25 bp, artificial sequence
  antisense probe sequence
gaagtgggccaaattcttgcaatac

SEQ ID NO: 2668 - DNA, 25 bp, artificial sequence
  antisense probe sequence
attcttgcaatacaccctattcaat

SEQ ID NO: 2669 - DNA, 25 bp, artificial sequence
  antisense probe sequence
taaaatttgctaccctgaattctga

SEQ ID NO: 2670 - DNA, 25 bp, artificial sequence
  antisense probe sequence
ttgctaccctgaattctgaaatatt

SEQ ID NO: 2671 - DNA, 25 bp, artificial sequence
  antisense probe sequence
aaaatacttttaatgtctgacatct

SEQ ID NO: 2672 - DNA, 25 bp, artificial sequence
  antisense probe sequence
gtctgacatctcttacatttcacat

SEQ ID NO: 2673 - DNA, 25 bp, artificial sequence
  antisense probe sequence
acatttcacatggttctttttattc

SEQ ID NO: 2674 - DNA, 25 bp, artificial sequence
  antisense probe sequence
aaatttaccctttgacataataatg

SEQ ID NO: 2675 - DNA, 25 bp, artificial sequence
  antisense probe sequence
agtgccatgtaattgtagcttgcta

SEQ ID NO: 2676 - DNA, 25 bp, artificial sequence
  antisense probe sequence
tttaaccatttaacactctctgcca

SEQ ID NO: 2677 - DNA, 25 bp, artificial sequence
  antisense probe sequence
agaaagtggttctactcttactgaa

SEQ ID NO: 2678 - DNA, 25 bp, artificial sequence
  antisense probe sequence
cttactgaacacattctctctgaca

SEQ ID NO: 2679 - DNA, 25 bp, artificial sequence
  antisense probe sequence
tgacaaaatcaccagctgctttatt

SEQ ID NO: 2680 - DNA, 25 bp, artificial sequence
  antisense probe sequence
cttgaccaaaactgctcagctgaga

SEQ ID NO: 2681 - DNA, 25 bp, artificial sequence
  antisense probe sequence
cagtcctgccttttaaatcttgtgg

SEQ ID NO: 2682 - DNA, 25 bp, artificial sequence
  antisense probe sequence
aatcttgtggcagctcagaagggag

SEQ ID NO: 2683 - DNA, 25 bp, artificial sequence
  antisense probe sequence
gattggttactgctcacacatgatg

SEQ ID NO: 2684 - DNA, 25 bp, artificial sequence
  antisense probe sequence
atatatgcttgtttccttgcacctg

SEQ ID NO: 2685 - DNA, 25 bp, artificial sequence
  antisense probe sequence
tttccttcccctgtaggcaataaat

SEQ ID NO: 2686 - DNA, 25 bp, artificial sequence
  antisense probe sequence
tcctcatttaactttacaaccttgc

SEQ ID NO: 2687 - DNA, 25 bp, artificial sequence
  antisense probe sequence
acaaccttgcgaagtgggtccagga

SEQ ID NO: 2688 - DNA, 25 bp, artificial sequence
  antisense probe sequence
agtaatgggcattgtcctgcattcc

SEQ ID NO: 2689 - DNA, 25 bp, artificial sequence
  antisense probe sequence
taagcttctatcctggcctgaataa

SEQ ID NO: 2690 - DNA, 25 bp, artificial sequence
  antisense probe sequence
ggtctcagagatcaagccatatcct

SEQ ID NO: 2691 - DNA, 25 bp, artificial sequence
  antisense probe sequence
ccatatcctcaggccttatttccat

SEQ ID NO: 2692 - DNA, 25 bp, artificial sequence
  antisense probe sequence
acctttgcttctccgctaatgaaat

SEQ ID NO: 2693 - DNA, 25 bp, artificial sequence
  antisense probe sequence
tgagctggcaagacctctgttcatt

SEQ ID NO: 2694 - DNA, 25 bp, artificial sequence
  antisense probe sequence
gaactctatttcgaaccaagcctgt

SEQ ID NO: 2695 - DNA, 25 bp, artificial sequence
  antisense probe sequence
ctccttctttctcaatagctacttt

SEQ ID NO: 2696 - DNA, 25 bp, artificial sequence
  antisense probe sequence
tagctactttcttactgctttttga

SEQ ID NO: 2697 - DNA, 25 bp, artificial sequence
  antisense probe sequence
ggacacccagtagaccctgaatttc

SEQ ID NO: 2698 - DNA, 25 bp, artificial sequence
  antisense probe sequence
tttcactctctctaaaaggttctga

SEQ ID NO: 2699 - DNA, 25 bp, artificial sequence
  antisense probe sequence
cctcctgtgcactgttagctatggc

SEQ ID NO: 2700 - DNA, 25 bp, artificial sequence
  antisense probe sequence
tgttagctatggccacgggagcctc

SEQ ID NO: 2701 - DNA, 25 bp, artificial sequence
  antisense probe sequence
ccagagctgcctggtagcttcaggt

SEQ ID NO: 2702 - DNA, 25 bp, artificial sequence
  antisense probe sequence
ggttgacctgcttatcaggcctacg

SEQ ID NO: 2703 - DNA, 25 bp, artificial sequence
  antisense probe sequence
ggcctacgatccttctgatttaagt

SEQ ID NO: 2704 - DNA, 25 bp, artificial sequence
  antisense probe sequence
ggacctagcataccgtggagaacca

SEQ ID NO: 2705 - DNA, 25 bp, artificial sequence
  antisense probe sequence
gaaagtcaaatgggggacctgtcca

SEQ ID NO: 2706 - DNA, 25 bp, artificial sequence
  antisense probe sequence
gtccattgtgctctattaatcttgt

SEQ ID NO: 2707 - DNA, 25 bp, artificial sequence
  antisense probe sequence
aaatttgagtttgtccttgttctag

SEQ ID NO: 2708 - DNA, 25 bp, artificial sequence
  antisense probe sequence
aactcactcattgtcaggtgtccgt

SEQ ID NO: 2709 - DNA, 25 bp, artificial sequence
  antisense probe sequence
gtgtccgtggagtgtttttggcatg

SEQ ID NO: 2710 - DNA, 25 bp, artificial sequence
  antisense probe sequence
tttggcatggtgacctgtctgggcc

SEQ ID NO: 2711 - DNA, 25 bp, artificial sequence
  antisense probe sequence
gggcccagcatgttgcagatgtgta

SEQ ID NO: 2712 - DNA, 25 bp, artificial sequence
  antisense probe sequence
gtatgcatatctctgtgtgactgtc

SEQ ID NO: 2713 - DNA, 25 bp, artificial sequence
  antisense probe sequence
ttgcaagctggctggatccaaccat

SEQ ID NO: 2714 - DNA, 25 bp, artificial sequence
  antisense probe sequence
gggggaggtcactgcagaaggatgg

SEQ ID NO: 2715 - DNA, 25 bp, artificial sequence
  antisense probe sequence
atggaactgacctttattccccagt

SEQ ID NO: 2716 - DNA, 25 bp, artificial sequence
  antisense probe sequence
ccggactcctgaagactgcacaagg

SEQ ID NO: 2717 - DNA, 25 bp, artificial sequence
  antisense probe sequence
ctctgctccgtactagcgtttacag

SEQ ID NO: 2718 - DNA, 25 bp, artificial sequence
  antisense probe sequence
tgcctgtactagtttttagacccca

SEQ ID NO: 2719 - DNA, 25 bp, artificial sequence
  antisense probe sequence
acatctgctagaaccttttgcctta

SEQ ID NO: 2720 - DNA, 25 bp, artificial sequence
  antisense probe sequence
ccttttgccttaactattcaccaat

SEQ ID NO: 2721 - DNA, 25 bp, artificial sequence
  antisense probe sequence
attagaatcttgtcttggttccatt

SEQ ID NO: 2722 - DNA, 25 bp, artificial sequence
  antisense probe sequence
gatggctaatatttgttatcttaat

SEQ ID NO: 2723 - DNA, 25 bp, artificial sequence
  antisense probe sequence
atttctgaggtcatgattacttgaa

SEQ ID NO: 2724 - DNA, 25 bp, artificial sequence
  antisense probe sequence
atattgactaaaactgggtccttag

SEQ ID NO: 2725 - DNA, 25 bp, artificial sequence
  antisense probe sequence
gggtccttagaaattccaggtggag

SEQ ID NO: 2726 - DNA, 25 bp, artificial sequence
  antisense probe sequence
gtggagctgatttacctatgactga

SEQ ID NO: 2727 - DNA, 25 bp, artificial sequence
  antisense probe sequence
aattaatgacacatctgttcaataa

SEQ ID NO: 2728 - DNA, 25 bp, artificial sequence
  antisense probe sequence
gtaatgtcatcacaataagctcttg

SEQ ID NO: 2729 - DNA, 25 bp, artificial sequence
  antisense probe sequence
aattaggtttatgtttcatgtcttt

SEQ ID NO: 2730 - DNA, 25 bp, artificial sequence
  antisense probe sequence
tcttcaccctacaacatctatgtta

SEQ ID NO: 2731 - DNA, 25 bp, artificial sequence
  antisense probe sequence
aaaatgcctcccacaattgcagact

SEQ ID NO: 2732 - DNA, 25 bp, artificial sequence
  antisense probe sequence
acaattgcagactcactcattttac

SEQ ID NO: 2733 - DNA, 25 bp, artificial sequence
  antisense probe sequence
ttgtcaacaccttttcttgggacca

SEQ ID NO: 2734 - DNA, 25 bp, artificial sequence
  antisense probe sequence
aagtcagtggataccgtgtcctgta

SEQ ID NO: 2735 - DNA, 25 bp, artificial sequence
  antisense probe sequence
gtgtcctgtagacatgtcacttgtg

SEQ ID NO: 2736 - DNA, 25 bp, artificial sequence
  antisense probe sequence
aaggcacggacaacatgaactggca

SEQ ID NO: 2737 - DNA, 25 bp, artificial sequence
  antisense probe sequence
tgattttacctcttagttcttacga

SEQ ID NO: 2738 - DNA, 25 bp, artificial sequence
  antisense probe sequence
gaaggatggttatcgggctggaaaa

SEQ ID NO: 2739 - DNA, 25 bp, artificial sequence
  antisense probe sequence
actgatgctttggagcctctcaatg

SEQ ID NO: 2740 - DNA, 25 bp, artificial sequence
  antisense probe sequence
gatttgcagcacaatccaactttga

SEQ ID NO: 2741 - DNA, 25 bp, artificial sequence
  antisense probe sequence
tacctctgtcgacctgtgaaactga

SEQ ID NO: 2742 - DNA, 25 bp, artificial sequence
  antisense probe sequence
cctctgtcgacctgtgaaactgaac

SEQ ID NO: 2743 - DNA, 25 bp, artificial sequence
  antisense probe sequence
gaaactgaacaaacagcttatctgc

SEQ ID NO: 2744 - DNA, 25 bp, artificial sequence
  antisense probe sequence
gcttatctgcccctaatgtgaaatg

SEQ ID NO: 2745 - DNA, 25 bp, artificial sequence
  antisense probe sequence
cttatctgcccctaatgtgaaatga

SEQ ID NO: 2746 - DNA, 25 bp, artificial sequence
  antisense probe sequence
atctgcccctaatgtgaaatgatgg

SEQ ID NO: 2747 - DNA, 25 bp, artificial sequence
  antisense probe sequence
gcccctaatgtgaaatgatgggaca

SEQ ID NO: 2748 - DNA, 25 bp, artificial sequence
  antisense probe sequence
aatccagcaggagtttcttagttag

SEQ ID NO: 2749 - DNA, 25 bp, artificial sequence
  antisense probe sequence
gtttcttagttaggatccacagcct

SEQ ID NO: 2750 - DNA, 25 bp, artificial sequence
  antisense probe sequence
cttagttaggatccacagcctggga

SEQ ID NO: 2751 - DNA, 25 bp, artificial sequence
  antisense probe sequence
tctgcatttcttgaaaccattatta

SEQ ID NO: 2752 - DNA, 25 bp, artificial sequence
  antisense probe sequence
gagttcatgtgtctaatcattatct

SEQ ID NO: 2753 - DNA, 25 bp, artificial sequence
  antisense probe sequence
atcacatcagtagcaaacacagggt

SEQ ID NO: 2754 - DNA, 25 bp, artificial sequence
  antisense probe sequence
cacagggtgggaactcaatcttatg

SEQ ID NO: 2755 - DNA, 25 bp, artificial sequence
  antisense probe sequence
aatcttatgttatagcttactctta

SEQ ID NO: 2756 - DNA, 25 bp, artificial sequence
  antisense probe sequence
aatatttcagtgacttttcagattt

SEQ ID NO: 2757 - DNA, 25 bp, artificial sequence
  antisense probe sequence
gatttatttcttgttagccgctgtg

SEQ ID NO: 2758 - DNA, 25 bp, artificial sequence
  antisense probe sequence
agccgctgtgtctatttggtgctac

SEQ ID NO: 2759 - DNA, 25 bp, artificial sequence
  antisense probe sequence
ttttctcaccatttgcatgtacatc

SEQ ID NO: 2760 - DNA, 25 bp, artificial sequence
  antisense probe sequence
acatcatgtctttccaattgttttc

SEQ ID NO: 2761 - DNA, 25 bp, artificial sequence
  antisense probe sequence
ttgtgcagtggttcaacctgaccaa

SEQ ID NO: 2762 - DNA, 25 bp, artificial sequence
  antisense probe sequence
gtggtattatgctgctgggaagtaa

SEQ ID NO: 2763 - DNA, 25 bp, artificial sequence
  antisense probe sequence
gcctgcgtaagtgaggaaacagctg

SEQ ID NO: 2764 - DNA, 25 bp, artificial sequence
  antisense probe sequence
tgaggaaacagctgatcctgctcct

SEQ ID NO: 2765 - DNA, 25 bp, artificial sequence
  antisense probe sequence
ctcagcgaccgaccagtgacaatga

SEQ ID NO: 2766 - DNA, 25 bp, artificial sequence
  antisense probe sequence
accagtgacaatgacaggagctccc

SEQ ID NO: 2767 - DNA, 25 bp, artificial sequence
  antisense probe sequence
gtgacaatgacaggagctcccaggc

SEQ ID NO: 2768 - DNA, 25 bp, artificial sequence
  antisense probe sequence
ctgccctgggttctaagtactggac

SEQ ID NO: 2769 - DNA, 25 bp, artificial sequence
  antisense probe sequence
gccctgggttctaagtactggacac

SEQ ID NO: 2770 - DNA, 25 bp, artificial sequence
  antisense probe sequence
gggttctaagtactggacaccagcc

SEQ ID NO: 2771 - DNA, 25 bp, artificial sequence
  antisense probe sequence
cacggctggctgcagcgtcaagaga

SEQ ID NO: 2772 - DNA, 25 bp, artificial sequence
  antisense probe sequence
gctggctgcagcgtcaagagagttt

SEQ ID NO: 2773 - DNA, 25 bp, artificial sequence
  antisense probe sequence
gctgcagcgtcaagagagtttgtaa

SEQ ID NO: 2774 - DNA, 25 bp, artificial sequence
  antisense probe sequence
aacggaatacctgctaggttccagg

SEQ ID NO: 2775 - DNA, 25 bp, artificial sequence
  antisense probe sequence
gttagatctcagcagagcccattct

SEQ ID NO: 2776 - DNA, 25 bp, artificial sequence
  antisense probe sequence
agcccattctgcaagacctggctga

SEQ ID NO: 2777 - DNA, 25 bp, artificial sequence
  antisense probe sequence
acacaggaaccgagacctggcttcc

SEQ ID NO: 2778 - DNA, 25 bp, artificial sequence
  antisense probe sequence
ggactgtgtggccaaccaagtgctt

SEQ ID NO: 2779 - DNA, 25 bp, artificial sequence
  antisense probe sequence
caaagcaaactgctccgggtaccag

SEQ ID NO: 2780 - DNA, 25 bp, artificial sequence
  antisense probe sequence
cctccaacctggcaagggtgtgcgc

SEQ ID NO: 2781 - DNA, 25 bp, artificial sequence
  antisense probe sequence
gggcttgcaggtgagggggctgtat

SEQ ID NO: 2782 - DNA, 25 bp, artificial sequence
  antisense probe sequence
ggggctgtatgcttcaggaactaac

SEQ ID NO: 2783 - DNA, 25 bp, artificial sequence
  antisense probe sequence
tcaagcacagcaatcccatttggga

SEQ ID NO: 2784 - DNA, 25 bp, artificial sequence
  antisense probe sequence
ggtaagggcgcatggaatggggcta

SEQ ID NO: 2785 - DNA, 25 bp, artificial sequence
  antisense probe sequence
aggagttggtggagctgatagagaa

SEQ ID NO: 2786 - DNA, 25 bp, artificial sequence
  antisense probe sequence
ggtgcagtgcaacgaaggggcttac

SEQ ID NO: 2787 - DNA, 25 bp, artificial sequence
  antisense probe sequence
tgcaacgaaggggcttacttttctg

SEQ ID NO: 2788 - DNA, 25 bp, artificial sequence
  antisense probe sequence
ttctgatgacatatacaaggacaca

SEQ ID NO: 2789 - DNA, 25 bp, artificial sequence
  antisense probe sequence
gaggaaaatctacactgaccaatta

SEQ ID NO: 2790 - DNA, 25 bp, artificial sequence
  antisense probe sequence
ataggatttggaagatgctttcaga

SEQ ID NO: 2791 - DNA, 25 bp, artificial sequence
  antisense probe sequence
gaaatatggcataggtttttgtcga

SEQ ID NO: 2792 - DNA, 25 bp, artificial sequence
  antisense probe sequence
ggcataggtttttgtcgaaatgtaa

SEQ ID NO: 2793 - DNA, 25 bp, artificial sequence
  antisense probe sequence
ttttattcttcctaatttactgtga

SEQ ID NO: 2794 - DNA, 25 bp, artificial sequence
  antisense probe sequence
tcttcctaatttactgtgatttgtt

SEQ ID NO: 2795 - DNA, 25 bp, artificial sequence
  antisense probe sequence
gatagttagagaaatacctccttcc

SEQ ID NO: 2796 - DNA, 25 bp, artificial sequence
  antisense probe sequence
gggagaaacacatttactccccaat

SEQ ID NO: 2797 - DNA, 25 bp, artificial sequence
  antisense probe sequence
ctacatgaccatgcacccagtttgg

SEQ ID NO: 2798 - DNA, 25 bp, artificial sequence
  antisense probe sequence
aggtcagatcggaacaactcacttg

SEQ ID NO: 2799 - DNA, 25 bp, artificial sequence
  antisense probe sequence
gaatggagagtcccttcatctcagc

SEQ ID NO: 2800 - DNA, 25 bp, artificial sequence
  antisense probe sequence
tcagcagcggtggagactctctcct

SEQ ID NO: 2801 - DNA, 25 bp, artificial sequence
  antisense probe sequence
ctctaccagtgatttcagactcccg

SEQ ID NO: 2802 - DNA, 25 bp, artificial sequence
  antisense probe sequence
gatggagaatttggagcctggcaga

SEQ ID NO: 2803 - DNA, 25 bp, artificial sequence
  antisense probe sequence
agagactggacagctctggaggaac

SEQ ID NO: 2804 - DNA, 25 bp, artificial sequence
  antisense probe sequence
tctggaggaacaggcctgctgaggg

SEQ ID NO: 2805 - DNA, 25 bp, artificial sequence
  antisense probe sequence
ggcctctggagtgggacactggccc

SEQ ID NO: 2806 - DNA, 25 bp, artificial sequence
  antisense probe sequence
cctgtgggcagggttcttagtggat

SEQ ID NO: 2807 - DNA, 25 bp, artificial sequence
  antisense probe sequence
gatgttgaaacctgtttggcacctt

SEQ ID NO: 2808 - DNA, 25 bp, artificial sequence
  antisense probe sequence
gtttggcaccttctggaagctacca

SEQ ID NO: 2809 - DNA, 25 bp, artificial sequence
  antisense probe sequence
cataagaattctactggcctattgt

SEQ ID NO: 2810 - DNA, 25 bp, artificial sequence
  antisense probe sequence
aaacacaattccaatcctttttctg

SEQ ID NO: 2811 - DNA, 25 bp, artificial sequence
  antisense probe sequence
ggatctaagttaaatcttttggcaa

SEQ ID NO: 2812 - DNA, 25 bp, artificial sequence
  antisense probe sequence
actcagacatattttgctgttcatg

SEQ ID NO: 2813 - DNA, 25 bp, artificial sequence
  antisense probe sequence
cctgttctcatggatttgttttccc

SEQ ID NO: 2814 - DNA, 25 bp, artificial sequence
  antisense probe sequence
gatttgttttcccatactgttttct

SEQ ID NO: 2815 - DNA, 25 bp, artificial sequence
  antisense probe sequence
catactgttttctctgatctcaatt

SEQ ID NO: 2816 - DNA, 25 bp, artificial sequence
  antisense probe sequence
atctcaattacaggttggatctcac

SEQ ID NO: 2817 - DNA, 25 bp, artificial sequence
  antisense probe sequence
attttgccactgttgattactatac

SEQ ID NO: 2818 - DNA, 25 bp, artificial sequence
  antisense probe sequence
aaccaatacacaaaattttcctatg

SEQ ID NO: 2819 - DNA, 25 bp, artificial sequence
  antisense probe sequence
attttcctatgtcagaatgtggtgg

SEQ ID NO: 2820 - DNA, 25 bp, artificial sequence
  antisense probe sequence
atttggtgtgcttgcgatttttttt

SEQ ID NO: 2821 - DNA, 25 bp, artificial sequence
  antisense probe sequence
ttctcctgatcccggtgaagtgtac

SEQ ID NO: 2822 - DNA, 25 bp, artificial sequence
  antisense probe sequence
gatcccggtgaagtgtacatcataa

SEQ ID NO: 2823 - DNA, 25 bp, artificial sequence
  antisense probe sequence
agtgtacatcataagaatccatagt

SEQ ID NO: 2824 - DNA, 25 bp, artificial sequence
  antisense probe sequence
tactttgaagtaccattgcaccaag

SEQ ID NO: 2825 - DNA, 25 bp, artificial sequence
  antisense probe sequence
accattgcaccaagatgtctgactg

SEQ ID NO: 2826 - DNA, 25 bp, artificial sequence
  antisense probe sequence
gtctgactgaattcatagtcacact

SEQ ID NO: 2827 - DNA, 25 bp, artificial sequence
  antisense probe sequence
taagatctaagctcctgcttattta

SEQ ID NO: 2828 - DNA, 25 bp, artificial sequence
  antisense probe sequence
gatacagcctatcctatactattta

SEQ ID NO: 2829 - DNA, 25 bp, artificial sequence
  antisense probe sequence
tatgtcctcagttttacttctacca

SEQ ID NO: 2830 - DNA, 25 bp, artificial sequence
  antisense probe sequence
aaaacatccctgtatgtgtgtgcat

SEQ ID NO: 2831 - DNA, 25 bp, artificial sequence
  antisense probe sequence
gtgtgtgttggggagtgtatgtgat

SEQ ID NO: 2832 - DNA, 25 bp, artificial sequence
  antisense probe sequence
gtgtatgtgatctgggtgtttgttt

SEQ ID NO: 2833 - DNA, 25 bp, artificial sequence
  antisense probe sequence
tgtttatctctgttattattcccct

SEQ ID NO: 2834 - DNA, 25 bp, artificial sequence
  antisense probe sequence
ctttagctttattttagtcaactct

SEQ ID NO: 2835 - DNA, 25 bp, artificial sequence
  antisense probe sequence
aattcaatctcacatgttactgcag

SEQ ID NO: 2836 - DNA, 25 bp, artificial sequence
  antisense probe sequence
gatagttaacttttgctgcaatcta

SEQ ID NO: 2837 - DNA, 25 bp, artificial sequence
  antisense probe sequence
aaaattaaggtactctcactgcaga

SEQ ID NO: 2838 - DNA, 25 bp, artificial sequence
  antisense probe sequence
aaggcctgggcctaatgtgctgtat

SEQ ID NO: 2839 - DNA, 25 bp, artificial sequence
  antisense probe sequence
gtgctgtattatgaagccttgtgac

SEQ ID NO: 2840 - DNA, 25 bp, artificial sequence
  antisense probe sequence
gaaatggtggtttccttctgataag

SEQ ID NO: 2841 - DNA, 25 bp, artificial sequence
  antisense probe sequence
ggaccatgtcgcttatatatcaccc

SEQ ID NO: 2842 - DNA, 25 bp, artificial sequence
  antisense probe sequence
cgcttatatatcaccctactagggg

SEQ ID NO: 2843 - DNA, 25 bp, artificial sequence
  antisense probe sequence
gatataattttcccttctaagcaag

SEQ ID NO: 2844 - DNA, 25 bp, artificial sequence
  antisense probe sequence
aatggcagtgctaaatagttttgta

SEQ ID NO: 2845 - DNA, 25 bp, artificial sequence
  antisense probe sequence
aatatttttcagatgcatttgcatt

SEQ ID NO: 2846 - DNA, 25 bp, artificial sequence
  antisense probe sequence
ggactgaaattctgttacatgatgt

SEQ ID NO: 2847 - DNA, 25 bp, artificial sequence
  antisense probe sequence
atataaagcaaattcacacgttttc

SEQ ID NO: 2848 - DNA, 25 bp, artificial sequence
  antisense probe sequence
gaaacctcagtcttgaaattttgat

SEQ ID NO: 2849 - DNA, 25 bp, artificial sequence
  antisense probe sequence
aaaaatcatgacactgttttaccat

SEQ ID NO: 2850 - DNA, 25 bp, artificial sequence
  antisense probe sequence
gagtagctaacttttggtaacacct

SEQ ID NO: 2851 - DNA, 25 bp, artificial sequence
  antisense probe sequence
gagacttcattggtgatacactcaa

SEQ ID NO: 2852 - DNA, 25 bp, artificial sequence
  antisense probe sequence
gtgatacactcaatttttactgggt

SEQ ID NO: 2853 - DNA, 25 bp, artificial sequence
  antisense probe sequence
gctaataatgttggtcactgtctca

SEQ ID NO: 2854 - DNA, 25 bp, artificial sequence
  antisense probe sequence
cacaaagcttttgggtaaccagcgt

SEQ ID NO: 2855 - DNA, 25 bp, artificial sequence
  antisense probe sequence
gggtaaccagcgttcttaaatgtat

SEQ ID NO: 2856 - DNA, 25 bp, artificial sequence
  antisense probe sequence
tatggtttttgaccaggtgaaccct

SEQ ID NO: 2857 - DNA, 25 bp, artificial sequence
  antisense probe sequence
gaccaggtgaaccctttagaagtga

SEQ ID NO: 2858 - DNA, 25 bp, artificial sequence
  antisense probe sequence
aaatacctttggctgtgatgaatgt

SEQ ID NO: 2859 - DNA, 25 bp, artificial sequence
  antisense probe sequence
tgaatgtagatcccagcagaatacc

SEQ ID NO: 2860 - DNA, 25 bp, artificial sequence
  antisense probe sequence
ttgactgagtatttgtagatgctta

SEQ ID NO: 2861 - DNA, 25 bp, artificial sequence
  antisense probe sequence
aagttctcaggtactgttcaattat

SEQ ID NO: 2862 - DNA, 25 bp, artificial sequence
  antisense probe sequence
gaaacacttttagagcacttgagga

SEQ ID NO: 2863 - DNA, 25 bp, artificial sequence
  antisense probe sequence
ataggaccccagacagtttatacct

SEQ ID NO: 2864 - DNA, 25 bp, artificial sequence
  antisense probe sequence
gtttataccttccatttgctgtttt

SEQ ID NO: 2865 - DNA, 25 bp, artificial sequence
  antisense probe sequence
aagtgtgagcctgccaagtcaacaa

SEQ ID NO: 2866 - DNA, 25 bp, artificial sequence
  antisense probe sequence
gcctgccaagtcaacaagtatgcct

SEQ ID NO: 2867 - DNA, 25 bp, artificial sequence
  antisense probe sequence
caagtatgcctttagcgcacatgta

SEQ ID NO: 2868 - DNA, 25 bp, artificial sequence
  antisense probe sequence
cacatgtaaatagcctgcacttcct

SEQ ID NO: 2869 - DNA, 25 bp, artificial sequence
  antisense probe sequence
gcacttcctaaatctcgtgtggcct

SEQ ID NO: 2870 - DNA, 25 bp, artificial sequence
  antisense probe sequence
attttgccacattctgtaactgttt

SEQ ID NO: 2871 - DNA, 25 bp, artificial sequence
  antisense probe sequence
tttcatcttttgtttcgtgtatata

SEQ ID NO: 2872 - DNA, 25 bp, artificial sequence
  antisense probe sequence
gtgtatatactgtttgcctttttca

SEQ ID NO: 2873 - DNA, 25 bp, artificial sequence
  antisense probe sequence
aaaggcccactgataatgctgcact

SEQ ID NO: 2874 - DNA, 25 bp, artificial sequence
  antisense probe sequence
ccacttcatgcctacatcatgggaa

SEQ ID NO: 2875 - DNA, 25 bp, artificial sequence
  antisense probe sequence
gcagatcactgctaacaatccacat

SEQ ID NO: 2876 - DNA, 25 bp, artificial sequence
  antisense probe sequence
ttcagtttcccttgcttaacatttg

SEQ ID NO: 2877 - DNA, 25 bp, artificial sequence
  antisense probe sequence
aaaatcctatttaattcgcttcaat

SEQ ID NO: 2878 - DNA, 25 bp, artificial sequence
  antisense probe sequence
tgacctcttgagatttacaaccccc

SEQ ID NO: 2879 - DNA, 25 bp, artificial sequence
  antisense probe sequence
tcttgattttattggcacctcccag

SEQ ID NO: 2880 - DNA, 25 bp, artificial sequence
  antisense probe sequence
caggcactttggcatgtgctcctgt

SEQ ID NO: 2881 - DNA, 25 bp, artificial sequence
  antisense probe sequence
gtgtagttactgtgcctgtagagtt

SEQ ID NO: 2882 - DNA, 25 bp, artificial sequence
  antisense probe sequence
gacaagtccacttttggcttaccat

SEQ ID NO: 2883 - DNA, 25 bp, artificial sequence
  antisense probe sequence
catggagatctgctccaacacatgc

SEQ ID NO: 2884 - DNA, 25 bp, artificial sequence
  antisense probe sequence
cctgtgatgatagcttcttcccatg

SEQ ID NO: 2885 - DNA, 25 bp, artificial sequence
  antisense probe sequence
tgtgatgatagcttcttcccatgtg

SEQ ID NO: 2886 - DNA, 25 bp, artificial sequence
  antisense probe sequence
gatagcttcttcccatgtggggatt

SEQ ID NO: 2887 - DNA, 25 bp, artificial sequence
  antisense probe sequence
gcttcttcccatgtggggattaagg

SEQ ID NO: 2888 - DNA, 25 bp, artificial sequence
  antisense probe sequence
tgtggggattaagggtagggagtgg

SEQ ID NO: 2889 - DNA, 25 bp, artificial sequence
  antisense probe sequence
gaatggtccaaacccggaaggagct

SEQ ID NO: 2890 - DNA, 25 bp, artificial sequence
  antisense probe sequence
ggtccaaacccggaaggagctaatg

SEQ ID NO: 2891 - DNA, 25 bp, artificial sequence
  antisense probe sequence
ggagctaatggagaggatagggcca

SEQ ID NO: 2892 - DNA, 25 bp, artificial sequence
  antisense probe sequence
agggccaaagtgggacagggcttgg

SEQ ID NO: 2893 - DNA, 25 bp, artificial sequence
  antisense probe sequence
agtgggacagggcttggatggtaga

SEQ ID NO: 2894 - DNA, 25 bp, artificial sequence
  antisense probe sequence
tgtagacgcgcaccggggtggagtt

SEQ ID NO: 2895 - DNA, 25 bp, artificial sequence
  antisense probe sequence
tcccctagtgaaatccatctgtcct

SEQ ID NO: 2896 - DNA, 25 bp, artificial sequence
  antisense probe sequence
atccatctgtcctgaagggaaccct

SEQ ID NO: 2897 - DNA, 25 bp, artificial sequence
  antisense probe sequence
caccaaagggaggccgcacggattc

SEQ ID NO: 2898 - DNA, 25 bp, artificial sequence
  antisense probe sequence
gagtaagactgagtctcctcaccga

SEQ ID NO: 2899 - DNA, 25 bp, artificial sequence
  antisense probe sequence
cgaagagatctggctgtatcccgag

SEQ ID NO: 2900 - DNA, 25 bp, artificial sequence
  antisense probe sequence
gtatcccgagtctctgaaacctttg

SEQ ID NO: 2901 - DNA, 25 bp, artificial sequence
  antisense probe sequence
atgtggagccgcaagggctcgccag

SEQ ID NO: 2902 - DNA, 25 bp, artificial sequence
  antisense probe sequence
ggctcgccagagggatctcaggagc

SEQ ID NO: 2903 - DNA, 25 bp, artificial sequence
  antisense probe sequence
ggagcgctgttgagtgacaggtctg

SEQ ID NO: 2904 - DNA, 25 bp, artificial sequence
  antisense probe sequence
gacaggtctgatgcagtagctttta

SEQ ID NO: 2905 - DNA, 25 bp, artificial sequence
  antisense probe sequence
gaaagtctacctttctaagttcagt

SEQ ID NO: 2906 - DNA, 25 bp, artificial sequence
  antisense probe sequence
gagccataaaattgaagccagtagc

SEQ ID NO: 2907 - DNA, 25 bp, artificial sequence
  antisense probe sequence
caatatggaggccttcttactgtag

SEQ ID NO: 2908 - DNA, 25 bp, artificial sequence
  antisense probe sequence
gtagggaagaggtgtctagcttaga

SEQ ID NO: 2909 - DNA, 25 bp, artificial sequence
  antisense probe sequence
ctagatgagattacccatagcaggg

SEQ ID NO: 2910 - DNA, 25 bp, artificial sequence
  antisense probe sequence
tgaatcatcacctaccaaagactgt

SEQ ID NO: 2911 - DNA, 25 bp, artificial sequence
  antisense probe sequence
aagactgtacggaaaggtgtgttat

SEQ ID NO: 2912 - DNA, 25 bp, artificial sequence
  antisense probe sequence
gcattttagtttgcacacatgtaaa

SEQ ID NO: 2913 - DNA, 25 bp, artificial sequence
  antisense probe sequence
agctccgcatcctaagacttaaaac

SEQ ID NO: 2914 - DNA, 25 bp, artificial sequence
  antisense probe sequence
gcaattcctatgcaaatcatctgct

SEQ ID NO: 2915 - DNA, 25 bp, artificial sequence
  antisense probe sequence
catctgcttaactgaactacaaacg

SEQ ID NO: 2916 - DNA, 25 bp, artificial sequence
  antisense probe sequence
ctacaaacgtttttcattaattcat

SEQ ID NO: 2917 - DNA, 25 bp, artificial sequence
  antisense probe sequence
gaaggctatgagttgctgctggccc

SEQ ID NO: 2918 - DNA, 25 bp, artificial sequence
  antisense probe sequence
tactggtacacttacatttcttgga

SEQ ID NO: 2919 - DNA, 25 bp, artificial sequence
  antisense probe sequence
gcagcagaaaccttgggatatcctt

SEQ ID NO: 2920 - DNA, 25 bp, artificial sequence
  antisense probe sequence
cttgtgggtcaaggaggcaactctc

SEQ ID NO: 2921 - DNA, 25 bp, artificial sequence
  antisense probe sequence
ctcctcacggattccctgatttgat

SEQ ID NO: 2922 - DNA, 25 bp, artificial sequence
  antisense probe sequence
aatccaagttttcacaagtttctct

SEQ ID NO: 2923 - DNA, 25 bp, artificial sequence
  antisense probe sequence
cctagaccaagaattcctaccacgc

SEQ ID NO: 2924 - DNA, 25 bp, artificial sequence
  antisense probe sequence
ttcctaccacgcaaggcctgtgaaa

SEQ ID NO: 2925 - DNA, 25 bp, artificial sequence
  antisense probe sequence
gatgccaaagtacctgtttttataa

SEQ ID NO: 2926 - DNA, 25 bp, artificial sequence
  antisense probe sequence
caatgatttttctgcagtaccttaa

SEQ ID NO: 2927 - DNA, 25 bp, artificial sequence
  antisense probe sequence
aattctgccatgtagtgccttattt

SEQ ID NO: 2928 - DNA, 25 bp, artificial sequence
  antisense probe sequence
atttttcttagctaaatctggcaac

SEQ ID NO: 2929 - DNA, 25 bp, artificial sequence
  antisense probe sequence
agcagaatctgccatatgagtaata

SEQ ID NO: 2930 - DNA, 25 bp, artificial sequence
  antisense probe sequence
gagtaatagaagtgagcaggcccag

SEQ ID NO: 2931 - DNA, 25 bp, artificial sequence
  antisense probe sequence
caggactccctaagtcaagaaacca

SEQ ID NO: 2932 - DNA, 25 bp, artificial sequence
  antisense probe sequence
agaaaccaagaggcgtcattacgga

SEQ ID NO: 2933 - DNA, 25 bp, artificial sequence
  antisense probe sequence
aaagagtaactcaccctgtgtgctc

SEQ ID NO: 2934 - DNA, 25 bp, artificial sequence
  antisense probe sequence
agcgatgcccccatgttatgaatgg

SEQ ID NO: 2935 - DNA, 25 bp, artificial sequence
  antisense probe sequence
ggaaaagttcactgaagggttcata

SEQ ID NO: 2936 - DNA, 25 bp, artificial sequence
  antisense probe sequence
ttggataccttcaagggatcagaaa

SEQ ID NO: 2937 - DNA, 25 bp, artificial sequence
  antisense probe sequence
tcatcattactctctacattattat

SEQ ID NO: 2938 - DNA, 25 bp, artificial sequence
  antisense probe sequence
ttttaacttgtctgcatgtttgaaa

SEQ ID NO: 2939 - DNA, 25 bp, artificial sequence
  antisense probe sequence
caacccaaagtctgaatttcttgag

SEQ ID NO: 2940 - DNA, 25 bp, artificial sequence
  antisense probe sequence
ggaagatggctgtttcatgtgagac

SEQ ID NO: 2941 - DNA, 25 bp, artificial sequence
  antisense probe sequence
gatgggggagtgagaatccctgtaa

SEQ ID NO: 2942 - DNA, 25 bp, artificial sequence
  antisense probe sequence
tctcctgtcaaaaaggcgtcttact

SEQ ID NO: 2943 - DNA, 25 bp, artificial sequence
  antisense probe sequence
ggcgtcttactgtaaatagtccaag

SEQ ID NO: 2944 - DNA, 25 bp, artificial sequence
  antisense probe sequence
atagtccaaggtgacatttgttagt

SEQ ID NO: 2945 - DNA, 25 bp, artificial sequence
  antisense probe sequence
gttagttttgaatactgcttttggg

SEQ ID NO: 2946 - DNA, 25 bp, artificial sequence
  antisense probe sequence
ttttcttttattctacacaatccaa

SEQ ID NO: 2947 - DNA, 25 bp, artificial sequence
  antisense probe sequence
ggtgatgcaattgtacactttctta

SEQ ID NO: 2948 - DNA, 25 bp, artificial sequence
  antisense probe sequence
aataccacattttagcagaaccaag

SEQ ID NO: 2949 - DNA, 25 bp, artificial sequence
  antisense probe sequence
tgacattattcattgggatctggcc

SEQ ID NO: 2950 - DNA, 25 bp, artificial sequence
  antisense probe sequence
cccagcctccaacctaatttgagtt

SEQ ID NO: 2951 - DNA, 25 bp, artificial sequence
  antisense probe sequence
ttttcatcaccttacatgtgttaac

SEQ ID NO: 2952 - DNA, 25 bp, artificial sequence
  antisense probe sequence
agaccgtgtttacataatctcttct

SEQ ID NO: 2953 - DNA, 25 bp, artificial sequence
  antisense probe sequence
tacttaacctttgcattggtccctt

SEQ ID NO: 2954 - DNA, 25 bp, artificial sequence
  antisense probe sequence
ttggtccctttcaggcttgaacaac

SEQ ID NO: 2955 - DNA, 25 bp, artificial sequence
  antisense probe sequence
gtatctgcatcgtggggttgctggt

SEQ ID NO: 2956 - DNA, 25 bp, artificial sequence
  antisense probe sequence
gaggatatccctgtattaggccatt

SEQ ID NO: 2957 - DNA, 25 bp, artificial sequence
  antisense probe sequence
aacatacaagacctgtggctactgg

SEQ ID NO: 2958 - DNA, 25 bp, artificial sequence
  antisense probe sequence
gagattgtttagtgggcccatggct

SEQ ID NO: 2959 - DNA, 25 bp, artificial sequence
  antisense probe sequence
gtgggcccatggctaggtggggtat

SEQ ID NO: 2960 - DNA, 25 bp, artificial sequence
  antisense probe sequence
cccttggcacagatctttgagaatc

SEQ ID NO: 2961 - DNA, 25 bp, artificial sequence
  antisense probe sequence
gggcctctcacaacatggcagttat

SEQ ID NO: 2962 - DNA, 25 bp, artificial sequence
  antisense probe sequence
tatttgtccccagagcaagcaacac

SEQ ID NO: 2963 - DNA, 25 bp, artificial sequence
  antisense probe sequence
gagcaagcaacaccggagggcaagg

SEQ ID NO: 2964 - DNA, 25 bp, artificial sequence
  antisense probe sequence
gatgttttttgtaacctagcctctg

SEQ ID NO: 2965 - DNA, 25 bp, artificial sequence
  antisense probe sequence
acctagcctctgaaagtgtcatacc

SEQ ID NO: 2966 - DNA, 25 bp, artificial sequence
  antisense probe sequence
aattctgtattttgttggtcacaca

SEQ ID NO: 2967 - DNA, 25 bp, artificial sequence
  antisense probe sequence
gtcacacagaccaagtcaactacaa

SEQ ID NO: 2968 - DNA, 25 bp, artificial sequence
  antisense probe sequence
tcaactacaacgtgggagactccta

SEQ ID NO: 2969 - DNA, 25 bp, artificial sequence
  antisense probe sequence
gggagactcctacacaaggcatgaa

SEQ ID NO: 2970 - DNA, 25 bp, artificial sequence
  antisense probe sequence
ggtgggcatttttaagtgtcatctg

SEQ ID NO: 2971 - DNA, 25 bp, artificial sequence
  antisense probe sequence
ggaaggaggctgtcacaacctggaa

SEQ ID NO: 2972 - DNA, 25 bp, artificial sequence
  antisense probe sequence
ggcctcctcccaaggagaacatgag

SEQ ID NO: 2973 - DNA, 25 bp, artificial sequence
  antisense probe sequence
ggagaacatgagaccacttcatatc

SEQ ID NO: 2974 - DNA, 25 bp, artificial sequence
  antisense probe sequence
gaccacttcatatctggaactctag

SEQ ID NO: 2975 - DNA, 25 bp, artificial sequence
  antisense probe sequence
ggaactctagaaacactggctgcag

SEQ ID NO: 2976 - DNA, 25 bp, artificial sequence
  antisense probe sequence
tagaaacactggctgcagcaatcaa

SEQ ID NO: 2977 - DNA, 25 bp, artificial sequence
  antisense probe sequence
agcatggacactgctagctgggttc

SEQ ID NO: 2978 - DNA, 25 bp, artificial sequence
  antisense probe sequence
gctgggtgacctcgagcaagtgact

SEQ ID NO: 2979 - DNA, 25 bp, artificial sequence
  antisense probe sequence
gacctcgagcaagtgactactcctc

SEQ ID NO: 2980 - DNA, 25 bp, artificial sequence
  antisense probe sequence
gtgactactcctcactggattgtag

SEQ ID NO: 2981 - DNA, 25 bp, artificial sequence
  antisense probe sequence
gtcattatttacagttcaccacacg

SEQ ID NO: 2982 - DNA, 25 bp, artificial sequence
  antisense probe sequence
tccctggatcctcaaaataacctca

SEQ ID NO: 2983 - DNA, 25 bp, artificial sequence
  antisense probe sequence
aaaacgtgacactttacatatttca

SEQ ID NO: 2984 - DNA, 25 bp, artificial sequence
  antisense probe sequence
gtgacactttacatatttcatattt

SEQ ID NO: 2985 - DNA, 25 bp, artificial sequence
  antisense probe sequence
tatttttcatatagtctggaggtat

SEQ ID NO: 2986 - DNA, 25 bp, artificial sequence
  antisense probe sequence
agtctggaggtatacacagttgttt

SEQ ID NO: 2987 - DNA, 25 bp, artificial sequence
  antisense probe sequence
aggtaattaagcatttggtcaagta

SEQ ID NO: 2988 - DNA, 25 bp, artificial sequence
  antisense probe sequence
aattgtgcttaatgttatatactgt

SEQ ID NO: 2989 - DNA, 25 bp, artificial sequence
  antisense probe sequence
tactgttattatttgcaggctggtt

SEQ ID NO: 2990 - DNA, 25 bp, artificial sequence
  antisense probe sequence
tatttgcaggctggttttaattctt

SEQ ID NO: 2991 - DNA, 25 bp, artificial sequence
  antisense probe sequence
attagatattgtatgtcccttcctc

SEQ ID NO: 2992 - DNA, 25 bp, artificial sequence
  antisense probe sequence
gtcccttcctctgtacaaattgtaa

SEQ ID NO: 2993 - DNA, 25 bp, artificial sequence
  antisense probe sequence
taggaagtgtgatactattgtaaat

SEQ ID NO: 2994 - DNA, 25 bp, artificial sequence
  antisense probe sequence
gtgattaaacattctagaccaggct

SEQ ID NO: 2995 - DNA, 25 bp, artificial sequence
  antisense probe sequence
aatgtcttttctattgtggtctgat

SEQ ID NO: 2996 - DNA, 25 bp, artificial sequence
  antisense probe sequence
gtggtctgatatccgtttctgtaat

SEQ ID NO: 2997 - DNA, 25 bp, artificial sequence
  antisense probe sequence
agatcagtttgttgtcctctgtgca

SEQ ID NO: 2998 - DNA, 25 bp, artificial sequence
  antisense probe sequence
tcctctgtgcaccagtggttttgcc

SEQ ID NO: 2999 - DNA, 25 bp, artificial sequence
  antisense probe sequence
taattttttttggctagcatcacca

SEQ ID NO: 3000 - DNA, 25 bp, artificial sequence
  antisense probe sequence
agcatcaccaagatctgtcatccag

SEQ ID NO: 3001 - DNA, 25 bp, artificial sequence
  antisense probe sequence
attgtgctgccagtggtattttccc

SEQ ID NO: 3002 - DNA, 25 bp, artificial sequence
  antisense probe sequence
aacatgctcatggaatgtccacctt

SEQ ID NO: 3003 - DNA, 25 bp, artificial sequence
  antisense probe sequence
tgttggtgttgttaatgtcatgact

SEQ ID NO: 3004 - DNA, 25 bp, artificial sequence
  antisense probe sequence
gattttcctctagtcctatgtgaat

SEQ ID NO: 3005 - DNA, 25 bp, artificial sequence
  antisense probe sequence
atagcaaattatgccctaagctgca

SEQ ID NO: 3006 - DNA, 25 bp, artificial sequence
  antisense probe sequence
gccctaagctgcaatctacgagaag

SEQ ID NO: 3007 - DNA, 25 bp, artificial sequence
  antisense probe sequence
gaagagttggtagctgtctcagaga

SEQ ID NO: 3008 - DNA, 25 bp, artificial sequence
  antisense probe sequence
aagacatctgtaatgcaatggggtc

SEQ ID NO: 3009 - DNA, 25 bp, artificial sequence
  antisense probe sequence
gcaatggggtctaaactgacttgtg

SEQ ID NO: 3010 - DNA, 25 bp, artificial sequence
  antisense probe sequence
gaacagatttcaatactacagactg

SEQ ID NO: 3011 - DNA, 25 bp, artificial sequence
  antisense probe sequence
ttcctgctcttgttcaaatgtaaaa

SEQ ID NO: 3012 - DNA, 25 bp, artificial sequence
  antisense probe sequence
aaacacaaggccaaatcaatcattt

SEQ ID NO: 3013 - DNA, 25 bp, artificial sequence
  antisense probe sequence
gaaattgaagtagcatgtcctctga

SEQ ID NO: 3014 - DNA, 25 bp, artificial sequence
  antisense probe sequence
gcatgtcctctgagttgcatgtttt

SEQ ID NO: 3015 - DNA, 25 bp, artificial sequence
  antisense probe sequence
tacaaatttttgtcctgcatgaata

SEQ ID NO: 3016 - DNA, 25 bp, artificial sequence
  antisense probe sequence
ggctgaggaggctggtctgaacatc

SEQ ID NO: 3017 - DNA, 25 bp, artificial sequence
  antisense probe sequence
tctgaacatcactcacatttgcctc

SEQ ID NO: 3018 - DNA, 25 bp, artificial sequence
  antisense probe sequence
cctccctccagatagcagtgaagcc

SEQ ID NO: 3019 - DNA, 25 bp, artificial sequence
  antisense probe sequence
atctctgagaacttgtttagcaaca

SEQ ID NO: 3020 - DNA, 25 bp, artificial sequence
  antisense probe sequence
gcaacaaagtcctcaatgccttgaa

SEQ ID NO: 3021 - DNA, 25 bp, artificial sequence
  antisense probe sequence
aagctggtgcgaggggatgcccatg

SEQ ID NO: 3022 - DNA, 25 bp, artificial sequence
  antisense probe sequence
ggggatgcccatgaatgttttgttt

SEQ ID NO: 3023 - DNA, 25 bp, artificial sequence
  antisense probe sequence
gccaaagctgtaattgaacttcttg

SEQ ID NO: 3024 - DNA, 25 bp, artificial sequence
  antisense probe sequence
catgggtctttggaagctgctctac

SEQ ID NO: 3025 - DNA, 25 bp, artificial sequence
  antisense probe sequence
ctgctctacaatgcctgttccagag

SEQ ID NO: 3026 - DNA, 25 bp, artificial sequence
  antisense probe sequence
ggaaaacacgccagcttcaaagcaa

SEQ ID NO: 3027 - DNA, 25 bp, artificial sequence
  antisense probe sequence
gcacgtccaaggtgatcctgagggc

SEQ ID NO: 3028 - DNA, 25 bp, artificial sequence
  antisense probe sequence
caccctgaagaaggctgtttccacc

SEQ ID NO: 3029 - DNA, 25 bp, artificial sequence
  antisense probe sequence
gacatggcccgaaatgcctatcact

SEQ ID NO: 3030 - DNA, 25 bp, artificial sequence
  antisense probe sequence
gcctatcacttcaagcgtgtgctca

SEQ ID NO: 3031 - DNA, 25 bp, artificial sequence
  antisense probe sequence
ctccaagtccaagctcaaggtcaag

SEQ ID NO: 3032 - DNA, 25 bp, artificial sequence
  antisense probe sequence
gacagcacaggtcactactgggctc

SEQ ID NO: 3033 - DNA, 25 bp, artificial sequence
  antisense probe sequence
tactgggctccaaacaggggcacaa

SEQ ID NO: 3034 - DNA, 25 bp, artificial sequence
  antisense probe sequence
caagcggcttatcaagggggttcga

SEQ ID NO: 3035 - DNA, 25 bp, artificial sequence
  antisense probe sequence
gggttcgaagggtggccaagtgcca

SEQ ID NO: 3036 - DNA, 25 bp, artificial sequence
  antisense probe sequence
atgaggcaggccaggcaagcagtca

SEQ ID NO: 3037 - DNA, 25 bp, artificial sequence
  antisense probe sequence
cgccattggctcagtgcagtgggaa

SEQ ID NO: 3038 - DNA, 25 bp, artificial sequence
  antisense probe sequence
gtgtttttgttgcatctccaagtca

SEQ ID NO: 3039 - DNA, 25 bp, artificial sequence
  antisense probe sequence
ggagcagatatatttcatttagcat

SEQ ID NO: 3040 - DNA, 25 bp, artificial sequence
  antisense probe sequence
tcccactctacaacgcatgtcaaag

SEQ ID NO: 3041 - DNA, 25 bp, artificial sequence
  antisense probe sequence
tagtttttccttagtatcgaacata

SEQ ID NO: 3042 - DNA, 25 bp, artificial sequence
  antisense probe sequence
atcgaacatatcacagctactcaat

SEQ ID NO: 3043 - DNA, 25 bp, artificial sequence
  antisense probe sequence
atttgttcctgtgtttccaccataa

SEQ ID NO: 3044 - DNA, 25 bp, artificial sequence
  antisense probe sequence
ttattgctcatatgtcttcctgtct

SEQ ID NO: 3045 - DNA, 25 bp, artificial sequence
  antisense probe sequence
agttgttacatcttgaaccatttaa

SEQ ID NO: 3046 - DNA, 25 bp, artificial sequence
  antisense probe sequence
aaaccctgagcccttttatcagtct

SEQ ID NO: 3047 - DNA, 25 bp, artificial sequence
  antisense probe sequence
ttatcagtctcctggctttaaacta

SEQ ID NO: 3048 - DNA, 25 bp, artificial sequence
  antisense probe sequence
gtgatttgggggattcctgaaacta

SEQ ID NO: 3049 - DNA, 25 bp, artificial sequence
  antisense probe sequence
caatgcagttgaggcctcctgtatc

SEQ ID NO: 3050 - DNA, 25 bp, artificial sequence
  antisense probe sequence
gcctcctgtatccgaacacgagagc

SEQ ID NO: 3051 - DNA, 25 bp, artificial sequence
  antisense probe sequence
aacacgagagctacagtccatggcc

SEQ ID NO: 3052 - DNA, 25 bp, artificial sequence
  antisense probe sequence
ctacagtccatggccgaccaagaaa

SEQ ID NO: 3053 - DNA, 25 bp, artificial sequence
  antisense probe sequence
cgaccaagaaaagatctccccagct

SEQ ID NO: 3054 - DNA, 25 bp, artificial sequence
  antisense probe sequence
ctgcccttaagaagaccctcttaga

SEQ ID NO: 3055 - DNA, 25 bp, artificial sequence
  antisense probe sequence
acagagtgaagctggaatcccccac

SEQ ID NO: 3056 - DNA, 25 bp, artificial sequence
  antisense probe sequence
gaaggactaaggcagcatctgtccc

SEQ ID NO: 3057 - DNA, 25 bp, artificial sequence
  antisense probe sequence
ggaagttttcaggtccttgtgataa

SEQ ID NO: 3058 - DNA, 25 bp, artificial sequence
  antisense probe sequence
tccttgtgataaaacctccttaaat

SEQ ID NO: 3059 - DNA, 25 bp, artificial sequence
  antisense probe sequence
tctgttcagaccaagcaatgcgagc

SEQ ID NO: 3060 - DNA, 25 bp, artificial sequence
  antisense probe sequence
cattgtgccattctagacttacctc

SEQ ID NO: 3061 - DNA, 25 bp, artificial sequence
  antisense probe sequence
aataatctagcgtctctaaccagtc

SEQ ID NO: 3062 - DNA, 25 bp, artificial sequence
  antisense probe sequence
gcgtctctaaccagtcaaacatttt

SEQ ID NO: 3063 - DNA, 25 bp, artificial sequence
  antisense probe sequence
ttacctttaaacctgctgctatggt

SEQ ID NO: 3064 - DNA, 25 bp, artificial sequence
  antisense probe sequence
ggattaacatctttctcttgacact

SEQ ID NO: 3065 - DNA, 25 bp, artificial sequence
  antisense probe sequence
acactgagactgggttctcctggga

SEQ ID NO: 3066 - DNA, 25 bp, artificial sequence
  antisense probe sequence
ctcttctattttgcgctttttgttt

SEQ ID NO: 3067 - DNA, 25 bp, artificial sequence
  antisense probe sequence
cttctgtttctctacgatgttttga

SEQ ID NO: 3068 - DNA, 25 bp, artificial sequence
  antisense probe sequence
atgaggcagtcatgagaacccacca

SEQ ID NO: 3069 - DNA, 25 bp, artificial sequence
  antisense probe sequence
catgagaacccaccagatacagctg

SEQ ID NO: 3070 - DNA, 25 bp, artificial sequence
  antisense probe sequence
tacagctgcctgatcctgaatttcc

SEQ ID NO: 3071 - DNA, 25 bp, artificial sequence
  antisense probe sequence
ggctcaaataccatacctcagaaaa

SEQ ID NO: 3072 - DNA, 25 bp, artificial sequence
  antisense probe sequence
gaaacagtctttgcagctgtgtgac

SEQ ID NO: 3073 - DNA, 25 bp, artificial sequence
  antisense probe sequence
gcagctgtgtgacaagtcactctac

SEQ ID NO: 3074 - DNA, 25 bp, artificial sequence
  antisense probe sequence
acaagtcactctactacatactgat

SEQ ID NO: 3075 - DNA, 25 bp, artificial sequence
  antisense probe sequence
actgatttggagacctccgctaaat

SEQ ID NO: 3076 - DNA, 25 bp, artificial sequence
  antisense probe sequence
gacctccgctaaatagttttatcac

SEQ ID NO: 3077 - DNA, 25 bp, artificial sequence
  antisense probe sequence
actgcagactaaaatgtgggacttg

SEQ ID NO: 3078 - DNA, 25 bp, artificial sequence
  antisense probe sequence
aaaggtttgtactgtctgagtgcac

SEQ ID NO: 3079 - DNA, 25 bp, artificial sequence
  antisense probe sequence
gtctgagtgcacagctactggaata

SEQ ID NO: 3080 - DNA, 25 bp, artificial sequence
  antisense probe sequence
ttagggaatctcaggaacaagcata

SEQ ID NO: 3081 - DNA, 25 bp, artificial sequence
  antisense probe sequence
gtaagtgcagtttttaattctgtat

SEQ ID NO: 3082 - DNA, 25 bp, artificial sequence
  antisense probe sequence
gaactgcagtggaatcgtccaacta

SEQ ID NO: 3083 - DNA, 25 bp, artificial sequence
  antisense probe sequence
attgccagttttggttctcctgaac

SEQ ID NO: 3084 - DNA, 25 bp, artificial sequence
  antisense probe sequence
tcctgaaccttatgccaccttaagg

SEQ ID NO: 3085 - DNA, 25 bp, artificial sequence
  antisense probe sequence
atccagtagctggcttgagattcca

SEQ ID NO: 3086 - DNA, 25 bp, artificial sequence
  antisense probe sequence
ggcttgagattccagtgctcacact

SEQ ID NO: 3087 - DNA, 25 bp, artificial sequence
  antisense probe sequence
tggtttccagagaatctggccccaa

SEQ ID NO: 3088 - DNA, 25 bp, artificial sequence
  antisense probe sequence
gaatctggccccaaagtccagaagg

SEQ ID NO: 3089 - DNA, 25 bp, artificial sequence
  antisense probe sequence
gtaagtatttgctcttttgaattta

SEQ ID NO: 3090 - DNA, 25 bp, artificial sequence
  antisense probe sequence
gtgtcagtcttggttgtgtattgca

SEQ ID NO: 3091 - DNA, 25 bp, artificial sequence
  antisense probe sequence
gtatgtggtaatttgctcctattag

SEQ ID NO: 3092 - DNA, 25 bp, artificial sequence
  antisense probe sequence
atattttcccatgttctctgttatt

SEQ ID NO: 3093 - DNA, 25 bp, artificial sequence
  antisense probe sequence
acagcctgcaagcgatatctggcat

SEQ ID NO: 3094 - DNA, 25 bp, artificial sequence
  antisense probe sequence
tatctggcatgattgttcctcctat

SEQ ID NO: 3095 - DNA, 25 bp, artificial sequence
  antisense probe sequence
gttcctcctatgtgaaagaattgcc

SEQ ID NO: 3096 - DNA, 25 bp, artificial sequence
  antisense probe sequence
gagagtaatctgatacaagtcccag

SEQ ID NO: 3097 - DNA, 25 bp, artificial sequence
  antisense probe sequence
tacaagtcccagagtggaactttta

SEQ ID NO: 3098 - DNA, 25 bp, artificial sequence
  antisense probe sequence
aacaaacaaaatcaccgaccttgca

SEQ ID NO: 3099 - DNA, 25 bp, artificial sequence
  antisense probe sequence
caccgaccttgcaaatactgaaatt

SEQ ID NO: 3100 - DNA, 25 bp, artificial sequence
  antisense probe sequence
ttggaagagggatctgcaagtgcag

SEQ ID NO: 3101 - DNA, 25 bp, artificial sequence
  antisense probe sequence
agtgcagggtgttggttaaagttgt

SEQ ID NO: 3102 - DNA, 25 bp, artificial sequence
  antisense probe sequence
gcttaattctgcaatcatttgtctt

SEQ ID NO: 3103 - DNA, 25 bp, artificial sequence
  antisense probe sequence
taaagctctatacaagggacactat

SEQ ID NO: 3104 - DNA, 25 bp, artificial sequence
  antisense probe sequence
agaaggccgtgactttataacaaag

SEQ ID NO: 3105 - DNA, 25 bp, artificial sequence
  antisense probe sequence
gagttgggtgagcccagtgcactgc

SEQ ID NO: 3106 - DNA, 25 bp, artificial sequence
  antisense probe sequence
cagtgcactgcacacaagagtcaag

SEQ ID NO: 3107 - DNA, 25 bp, artificial sequence
  antisense probe sequence
ctccgtctggtcagcaagctttaca

SEQ ID NO: 3108 - DNA, 25 bp, artificial sequence
  antisense probe sequence
gctgatcttggaaattcacctcttc

SEQ ID NO: 3109 - DNA, 25 bp, artificial sequence
  antisense probe sequence
gactatggaaacattctcaacaggg

SEQ ID NO: 3110 - DNA, 25 bp, artificial sequence
  antisense probe sequence
tcaacagggaaaccctactagactt

SEQ ID NO: 3111 - DNA, 25 bp, artificial sequence
  antisense probe sequence
atttatgggaattatcactgacagt

SEQ ID NO: 3112 - DNA, 25 bp, artificial sequence
  antisense probe sequence
tatcactgacagtttttgtacactt

SEQ ID NO: 3113 - DNA, 25 bp, artificial sequence
  antisense probe sequence
gtgttaaagcagcaactccatgttg

SEQ ID NO: 3114 - DNA, 25 bp, artificial sequence
  antisense probe sequence
gcaactccatgttgtaaatgcacaa

SEQ ID NO: 3115 - DNA, 25 bp, artificial sequence
  antisense probe sequence
tgagtcttttgaacacaggtatgaa

SEQ ID NO: 3116 - DNA, 25 bp, artificial sequence
  antisense probe sequence
tctaaaccaatgttacccctaccat

SEQ ID NO: 3117 - DNA, 25 bp, artificial sequence
  antisense probe sequence
gttacccctaccatacaggtatgtt

SEQ ID NO: 3118 - DNA, 25 bp, artificial sequence
  antisense probe sequence
aaccacattaaatattctgtccatt

SEQ ID NO: 3119 - DNA, 25 bp, artificial sequence
  antisense probe sequence
tgcagcatgcaaggcaagatgacaa

SEQ ID NO: 3120 - DNA, 25 bp, artificial sequence
  antisense probe sequence
aaataattatgacatgctttctgaa

SEQ ID NO: 3121 - DNA, 25 bp, artificial sequence
  antisense probe sequence
aagtgtccccagatagtttcataaa

SEQ ID NO: 3122 - DNA, 25 bp, artificial sequence
  antisense probe sequence
gaaaaacccatagacatcatgttca

SEQ ID NO: 3123 - DNA, 25 bp, artificial sequence
  antisense probe sequence
tgatgacaaggcatgttcataaccc

SEQ ID NO: 3124 - DNA, 25 bp, artificial sequence
  antisense probe sequence
cagctaaataactgcaatacttttg

SEQ ID NO: 3125 - DNA, 25 bp, artificial sequence
  antisense probe sequence
gagtttggcaggtttcgaagatgtg

SEQ ID NO: 3126 - DNA, 25 bp, artificial sequence
  antisense probe sequence
tcagtatttttattcgccttctaga

SEQ ID NO: 3127 - DNA, 25 bp, artificial sequence
  antisense probe sequence
atccacacatcacccatttatatta

SEQ ID NO: 3128 - DNA, 25 bp, artificial sequence
  antisense probe sequence
ggcttaccttctgtcatcaagtgat

SEQ ID NO: 3129 - DNA, 25 bp, artificial sequence
  antisense probe sequence
gtatcatcctggatcgtcatttcca

SEQ ID NO: 3130 - DNA, 25 bp, artificial sequence
  antisense probe sequence
gtcatttccaaggaactagcctttc

SEQ ID NO: 3131 - DNA, 25 bp, artificial sequence
  antisense probe sequence
ctttcttttcctaagcgtctgtatg

SEQ ID NO: 3132 - DNA, 25 bp, artificial sequence
  antisense probe sequence
gtatgtgttctaaaacttccagtat

SEQ ID NO: 3133 - DNA, 25 bp, artificial sequence
  antisense probe sequence
ctggagtacctatgtttgttttctt

SEQ ID NO: 3134 - DNA, 25 bp, artificial sequence
  antisense probe sequence
gattgtttcctggtctgtgttttta

SEQ ID NO: 3135 - DNA, 25 bp, artificial sequence
  antisense probe sequence
tttccttcagttttcctcatgaaga

SEQ ID NO: 3136 - DNA, 25 bp, artificial sequence
  antisense probe sequence
atcacattggttgtactctgaagac

SEQ ID NO: 3137 - DNA, 25 bp, artificial sequence
  antisense probe sequence
cctttcaaacgtttaccagctaatg

SEQ ID NO: 3138 - DNA, 25 bp, artificial sequence
  antisense probe sequence
gaaaggggctgcgagtggtaatata

SEQ ID NO: 3139 - DNA, 25 bp, artificial sequence
  antisense probe sequence
aagacctgtaggctatgtgtcttct

SEQ ID NO: 3140 - DNA, 25 bp, artificial sequence
  antisense probe sequence
gacaggttgtgttagtgaattttaa

SEQ ID NO: 3141 - DNA, 25 bp, artificial sequence
  antisense probe sequence
gaatagcacctgattaattaagagt

SEQ ID NO: 3142 - DNA, 25 bp, artificial sequence
  antisense probe sequence
gaaagtttattaaggcgtgcatggc

SEQ ID NO: 3143 - DNA, 25 bp, artificial sequence
  antisense probe sequence
tgcatggccttgggataacaatgaa

SEQ ID NO: 3144 - DNA, 25 bp, artificial sequence
  antisense probe sequence
tgaaaccatttgtctactggcatct

SEQ ID NO: 3145 - DNA, 25 bp, artificial sequence
  antisense probe sequence
ctgtctgctggtttcttgacaccag

SEQ ID NO: 3146 - DNA, 25 bp, artificial sequence
  antisense probe sequence
ttgttctaaggaatgcagtctttca

SEQ ID NO: 3147 - DNA, 25 bp, artificial sequence
  antisense probe sequence
tgcagtctttcagtcattatctttt

SEQ ID NO: 3148 - DNA, 25 bp, artificial sequence
  antisense probe sequence
cgatccttggagatcccgtaatccc

SEQ ID NO: 3149 - DNA, 25 bp, artificial sequence
  antisense probe sequence
tttggagcctgatttcctactgact

SEQ ID NO: 3150 - DNA, 25 bp, artificial sequence
  antisense probe sequence
tttcctactgacttccaatttagtg

SEQ ID NO: 3151 - DNA, 25 bp, artificial sequence
  antisense probe sequence
tgctcccccagtatgctaaatagaa

SEQ ID NO: 3152 - DNA, 25 bp, artificial sequence
  antisense probe sequence
aatagaaagccctctgcaatatatt

SEQ ID NO: 3153 - DNA, 25 bp, artificial sequence
  antisense probe sequence
gattatttactttctcttatctttt

SEQ ID NO: 3154 - DNA, 25 bp, artificial sequence
  antisense probe sequence
ttatcttttccttagtgttcctcaa

SEQ ID NO: 3155 - DNA, 25 bp, artificial sequence
  antisense probe sequence
aaattatatctatcctctaaaccag

SEQ ID NO: 3156 - DNA, 25 bp, artificial sequence
  antisense probe sequence
agggatcagcaaactataaccccca

SEQ ID NO: 3157 - DNA, 25 bp, artificial sequence
  antisense probe sequence
actcatttgtttacctactatctat

SEQ ID NO: 3158 - DNA, 25 bp, artificial sequence
  antisense probe sequence
tgacatggaccataggccctaaaga

SEQ ID NO: 3159 - DNA, 25 bp, artificial sequence
  antisense probe sequence
gcctctagggtgatggaccagcccc

SEQ ID NO: 3160 - DNA, 25 bp, artificial sequence
  antisense probe sequence
ttgactcaactacaggggcctggga

SEQ ID NO: 3161 - DNA, 25 bp, artificial sequence
  antisense probe sequence
aaggccgccaggagtgttttacatc

SEQ ID NO: 3162 - DNA, 25 bp, artificial sequence
  antisense probe sequence
taggagccaggtgatcaggcctcgg

SEQ ID NO: 3163 - DNA, 25 bp, artificial sequence
  antisense probe sequence
atgctccagaccctggggcaaggta

SEQ ID NO: 3164 - DNA, 25 bp, artificial sequence
  antisense probe sequence
gcaaggtaggccaggggcttctgac

SEQ ID NO: 3165 - DNA, 25 bp, artificial sequence
  antisense probe sequence
ggcttctgacctgtgcaggtgagag

SEQ ID NO: 3166 - DNA, 25 bp, artificial sequence
  antisense probe sequence
gggccatacccaggaaagaccattc

SEQ ID NO: 3167 - DNA, 25 bp, artificial sequence
  antisense probe sequence
ctgtccctgtctccttagaatggaa

SEQ ID NO: 3168 - DNA, 25 bp, artificial sequence
  antisense probe sequence
agctttttgagggcaggtccttgtc

SEQ ID NO: 3169 - DNA, 25 bp, artificial sequence
  antisense probe sequence
caggtccttgtctttgtacgttctg

SEQ ID NO: 3170 - DNA, 25 bp, artificial sequence
  antisense probe sequence
aaatgtatatatatcctagtcccct

SEQ ID NO: 3171 - DNA, 25 bp, artificial sequence
  antisense probe sequence
ccctaaccaaatcctgacctattgg

SEQ ID NO: 3172 - DNA, 25 bp, artificial sequence
  antisense probe sequence
cctgacctattgggatacttataaa

SEQ ID NO: 3173 - DNA, 25 bp, artificial sequence
  antisense probe sequence
gaaactgtatttgattggacttaat

SEQ ID NO: 3174 - DNA, 25 bp, artificial sequence
  antisense probe sequence
gagacttacttttatgacattctaa

SEQ ID NO: 3175 - DNA, 25 bp, artificial sequence
  antisense probe sequence
acaacttcaataataccatcactga

SEQ ID NO: 3176 - DNA, 25 bp, artificial sequence
  antisense probe sequence
aataataccatcactgacacttacc

SEQ ID NO: 3177 - DNA, 25 bp, artificial sequence
  antisense probe sequence
gacacttacctttattaattagctt

SEQ ID NO: 3178 - DNA, 25 bp, artificial sequence
  antisense probe sequence
atatgattacaaagttgcacagcat

SEQ ID NO: 3179 - DNA, 25 bp, artificial sequence
  antisense probe sequence
gttgcacagcataactactgagagg

SEQ ID NO: 3180 - DNA, 25 bp, artificial sequence
  antisense probe sequence
gattgatctgtttgtaattacttgt

SEQ ID NO: 3181 - DNA, 25 bp, artificial sequence
  antisense probe sequence
attagagctatatcattttactctg

SEQ ID NO: 3182 - DNA, 25 bp, artificial sequence
  antisense probe sequence
attttactctgaatgtcttaacata

SEQ ID NO: 3183 - DNA, 25 bp, artificial sequence
  antisense probe sequence
gattggattgatttcagccttcttc

SEQ ID NO: 3184 - DNA, 25 bp, artificial sequence
  antisense probe sequence
gattgatttcagccttcttctggta

SEQ ID NO: 3185 - DNA, 25 bp, artificial sequence
  antisense probe sequence
ttcagccttcttctggtacttttta

SEQ ID NO: 3186 - DNA, 25 bp, artificial sequence
  antisense probe sequence
tatgctgatcttgtgagtatttatt

SEQ ID NO: 3187 - DNA, 25 bp, artificial sequence
  antisense probe sequence
ataaaatctatgtgtgcttgataag

SEQ ID NO: 3188 - DNA, 25 bp, artificial sequence
  antisense probe sequence
acaatctcctttctttagtacttat

SEQ ID NO: 3189 - DNA, 25 bp, artificial sequence
  antisense probe sequence
tctcctttctttagtacttatgatt

SEQ ID NO: 3190 - DNA, 25 bp, artificial sequence
  antisense probe sequence
gtacttatgattggtgtgtgtgact

SEQ ID NO: 3191 - DNA, 25 bp, artificial sequence
  antisense probe sequence
ggtgtgtgtgacttcatcttatgaa

SEQ ID NO: 3192 - DNA, 25 bp, artificial sequence
  antisense probe sequence
tccagggtctctactgttctcctgg

SEQ ID NO: 3193 - DNA, 25 bp, artificial sequence
  antisense probe sequence
cttttctcatgctggctacttcagg

SEQ ID NO: 3194 - DNA, 25 bp, artificial sequence
  antisense probe sequence
acacctgtaggtctcatattttcaa

SEQ ID NO: 3195 - DNA, 25 bp, artificial sequence
  antisense probe sequence
ggatgatattacccgtgtctgtccc

SEQ ID NO: 3196 - DNA, 25 bp, artificial sequence
  antisense probe sequence
tgtctgtccctttttatcaggaaaa

SEQ ID NO: 3197 - DNA, 25 bp, artificial sequence
  antisense probe sequence
ctccagaaactcccctatgagaccg

SEQ ID NO: 3198 - DNA, 25 bp, artificial sequence
  antisense probe sequence
ggatttattgcttggggttctgtta

SEQ ID NO: 3199 - DNA, 25 bp, artificial sequence
  antisense probe sequence
agtatatgcactgtatcactccctc

SEQ ID NO: 3200 - DNA, 25 bp, artificial sequence
  antisense probe sequence
tccactagacctcacatccaggtat

SEQ ID NO: 3201 - DNA, 25 bp, artificial sequence
  antisense probe sequence
gcttctatgcacagagacttacctc

SEQ ID NO: 3202 - DNA, 25 bp, artificial sequence
  antisense probe sequence
tacctcttacctattcaactttaat

SEQ ID NO: 3203 - DNA, 25 bp, artificial sequence
  antisense probe sequence
gggacagacacttgtcattgccaag

SEQ ID NO: 3204 - DNA, 25 bp, artificial sequence
  antisense probe sequence
aaaaatagcacagtcattcctttgg

SEQ ID NO: 3205 - DNA, 25 bp, artificial sequence
  antisense probe sequence
tttggactaagtcaactcctaggcc

SEQ ID NO: 3206 - DNA, 25 bp, artificial sequence
  antisense probe sequence
gcctcctgagagcactgtagctgtg

SEQ ID NO: 3207 - DNA, 25 bp, artificial sequence
  antisense probe sequence
gtcacagggtactttcctatatacc

SEQ ID NO: 3208 - DNA, 25 bp, artificial sequence
  antisense probe sequence
tatataccagcgtacacctctatca

SEQ ID NO: 3209 - DNA, 25 bp, artificial sequence
  antisense probe sequence
acactgcctcatgcacagatataga

SEQ ID NO: 3210 - DNA, 25 bp, artificial sequence
  antisense probe sequence
ctttctttcccctgcaatgcagaaa

SEQ ID NO: 3211 - DNA, 25 bp, artificial sequence
  antisense probe sequence
acaaccacactaaaccaaccagaat

SEQ ID NO: 3212 - DNA, 25 bp, artificial sequence
  antisense probe sequence
ggttaatgagtccatactcctgcct

SEQ ID NO: 3213 - DNA, 25 bp, artificial sequence
  antisense probe sequence
gcctccagtcagaactgtcctaagc

SEQ ID NO: 3214 - DNA, 25 bp, artificial sequence
  antisense probe sequence
gccctgaaagctttatagtcctgga

SEQ ID NO: 3215 - DNA, 25 bp, artificial sequence
  antisense probe sequence
ggaacatacacagatatttggcaga

SEQ ID NO: 3216 - DNA, 25 bp, artificial sequence
  antisense probe sequence
ggcagaagtcgagtaaggaggggaa

SEQ ID NO: 3217 - DNA, 25 bp, artificial sequence
  antisense probe sequence
aagagtccgtgagtttcagtcattt

SEQ ID NO: 3218 - DNA, 25 bp, artificial sequence
  antisense probe sequence
gtttcagtcattttcactgctcttt

SEQ ID NO: 3219 - DNA, 25 bp, artificial sequence
  antisense probe sequence
tgtcactgaagacatcacagatact

SEQ ID NO: 3220 - DNA, 25 bp, artificial sequence
  antisense probe sequence
atatttatcttttggctttgtgtac

SEQ ID NO: 3221 - DNA, 25 bp, artificial sequence
  antisense probe sequence
ataaggctcatgttccagacctacg

SEQ ID NO: 3222 - DNA, 25 bp, artificial sequence
  antisense probe sequence
tcatgttccagacctacgatagctt

SEQ ID NO: 3223 - DNA, 25 bp, artificial sequence
  antisense probe sequence
gatagcttgtagtctatgttacgta

SEQ ID NO: 3224 - DNA, 25 bp, artificial sequence
  antisense probe sequence
tatgttacgtatttctttatatcac

SEQ ID NO: 3225 - DNA, 25 bp, artificial sequence
  antisense probe sequence
tgatctccaaacccttattttttct

SEQ ID NO: 3226 - DNA, 25 bp, artificial sequence
  antisense probe sequence
ttccactcatggacgatgcaaccaa

SEQ ID NO: 3227 - DNA, 25 bp, artificial sequence
  antisense probe sequence
gcaaccaacagatgcaatctctgag

SEQ ID NO: 3228 - DNA, 25 bp, artificial sequence
  antisense probe sequence
gatgaaaattgggacctcttattat

SEQ ID NO: 3229 - DNA, 25 bp, artificial sequence
  antisense probe sequence
tgacctagctggactcaggaaacca

SEQ ID NO: 3230 - DNA, 25 bp, artificial sequence
  antisense probe sequence
ttttctgctctggtgtataacaaac

SEQ ID NO: 3231 - DNA, 25 bp, artificial sequence
  antisense probe sequence
caaacaggtcaaaatttcccatctt

SEQ ID NO: 3232 - DNA, 25 bp, artificial sequence
  antisense probe sequence
ccatctttcctcctgatagtagttg

SEQ ID NO: 3233 - DNA, 25 bp, artificial sequence
  antisense probe sequence
ttgaatcctaccttgcatacttaat

SEQ ID NO: 3234 - DNA, 25 bp, artificial sequence
  antisense probe sequence
caaaacacaccaccatttcattagg

SEQ ID NO: 3235 - DNA, 25 bp, artificial sequence
  antisense probe sequence
ttgctttttcttaacccactatata

SEQ ID NO: 3236 - DNA, 25 bp, artificial sequence
  antisense probe sequence
taaagttgggcagtaatcttaatta

SEQ ID NO: 3237 - DNA, 25 bp, artificial sequence
  antisense probe sequence
tgttttacaactagaacctgcccta

SEQ ID NO: 3238 - DNA, 25 bp, artificial sequence
  antisense probe sequence
tagaacctgccctaaatgttgaata

SEQ ID NO: 3239 - DNA, 25 bp, artificial sequence
  antisense probe sequence
aatgttgaatatcttcctagcaaga

SEQ ID NO: 3240 - DNA, 25 bp, artificial sequence
  antisense probe sequence
cttcctagcaagaaacagtctgtca

SEQ ID NO: 3241 - DNA, 25 bp, artificial sequence
  antisense probe sequence
cagtctgtcattttacttacacgat

SEQ ID NO: 3242 - DNA, 25 bp, artificial sequence
  antisense probe sequence
acttacacgatgtctaaccaaacca

SEQ ID NO: 3243 - DNA, 25 bp, artificial sequence
  antisense probe sequence
gtctaaccaaaccataactttacat

SEQ ID NO: 3244 - DNA, 25 bp, artificial sequence
  antisense probe sequence
tacataaactagtcgtttcggtcaa

SEQ ID NO: 3245 - DNA, 25 bp, artificial sequence
  antisense probe sequence
gacccctgagtaccattaatattcc

SEQ ID NO: 3246 - DNA, 25 bp, artificial sequence
  antisense probe sequence
gagcagccattatgaaatctcacaa

SEQ ID NO: 3247 - DNA, 25 bp, artificial sequence
  antisense probe sequence
gtgctggctgggaccggaagaactc

SEQ ID NO: 3248 - DNA, 25 bp, artificial sequence
  antisense probe sequence
accggaagaactcctgcttggtgga

SEQ ID NO: 3249 - DNA, 25 bp, artificial sequence
  antisense probe sequence
cttccggcctgcagagagccgcaag

SEQ ID NO: 3250 - DNA, 25 bp, artificial sequence
  antisense probe sequence
gaagagcgccaagggcatgtactcc

SEQ ID NO: 3251 - DNA, 25 bp, artificial sequence
  antisense probe sequence
tattactatcccaaccgggcaggca

SEQ ID NO: 3252 - DNA, 25 bp, artificial sequence
  antisense probe sequence
gggccatgacacctgatcattggat

SEQ ID NO: 3253 - DNA, 25 bp, artificial sequence
  antisense probe sequence
tcaagaggggcactgctctactcat

SEQ ID NO: 3254 - DNA, 25 bp, artificial sequence
  antisense probe sequence
ctctactcatgagcctggacagctg

SEQ ID NO: 3255 - DNA, 25 bp, artificial sequence
  antisense probe sequence
cacctaggactgaggccggacctca

SEQ ID NO: 3256 - DNA, 25 bp, artificial sequence
  antisense probe sequence
ctcagactttgaccttggccgaatt

SEQ ID NO: 3257 - DNA, 25 bp, artificial sequence
  antisense probe sequence
gatgtggccctggagatacctagtt

SEQ ID NO: 3258 - DNA, 25 bp, artificial sequence
  antisense probe sequence
agagtcactacccgagttattcgcc

SEQ ID NO: 3259 - DNA, 25 bp, artificial sequence
  antisense probe sequence
gttattcgccggcgtttgattataa

SEQ ID NO: 3260 - DNA, 25 bp, artificial sequence
  antisense probe sequence
aaaggtatcctgtagctggatcatt

SEQ ID NO: 3261 - DNA, 25 bp, artificial sequence
  antisense probe sequence
ggatcattatgtggcattgctctac

SEQ ID NO: 3262 - DNA, 25 bp, artificial sequence
  antisense probe sequence
ttagaaactccttccttgtggttgt

SEQ ID NO: 3263 - DNA, 25 bp, artificial sequence
  antisense probe sequence
ttgtagaaactccttccttgtggtt

SEQ ID NO: 3264 - DNA, 25 bp, artificial sequence
  antisense probe sequence
atttttttgcacccttgaaagcttg

SEQ ID NO: 3265 - DNA, 25 bp, artificial sequence
  antisense probe sequence
gcatggtattctgtataggcctatt

SEQ ID NO: 3266 - DNA, 25 bp, artificial sequence
  antisense probe sequence
gatatgtggcggttgtagttttatt

SEQ ID NO: 3267 - DNA, 25 bp, artificial sequence
  antisense probe sequence
gtctcaaattcctactgccttaaga

SEQ ID NO: 3268 - DNA, 25 bp, artificial sequence
  antisense probe sequence
aaccagttcttcataagcaatcagt

SEQ ID NO: 3269 - DNA, 25 bp, artificial sequence
  antisense probe sequence
aataactgctaaggtcctattttga

SEQ ID NO: 3270 - DNA, 25 bp, artificial sequence
  antisense probe sequence
agagggagggatgttctttatttct

SEQ ID NO: 3271 - DNA, 25 bp, artificial sequence
  antisense probe sequence
agcgattgtaacaagacttcttgcc

SEQ ID NO: 3272 - DNA, 25 bp, artificial sequence
  antisense probe sequence
gacttcttgccatggttatttggag

SEQ ID NO: 3273 - DNA, 25 bp, artificial sequence
  antisense probe sequence
gagctattaagattaactgcctttt

SEQ ID NO: 3274 - DNA, 25 bp, artificial sequence
  antisense probe sequence
tagtttgtggctacattcctttttc

SEQ ID NO: 3275 - DNA, 25 bp, artificial sequence
  antisense probe sequence
tgctctcctttatgaaaagttcaag

SEQ ID NO: 3276 - DNA, 25 bp, artificial sequence
  antisense probe sequence
caggaagtagttactgagcgcctac

SEQ ID NO: 3277 - DNA, 25 bp, artificial sequence
  antisense probe sequence
taaattaatcgttttccacctggca

SEQ ID NO: 3278 - DNA, 25 bp, artificial sequence
  antisense probe sequence
tttccacctggcaagtagtctcatt

SEQ ID NO: 3279 - DNA, 25 bp, artificial sequence
  antisense probe sequence
cctggcaagtagtctcattggcaaa

SEQ ID NO: 3280 - DNA, 25 bp, artificial sequence
  antisense probe sequence
cttgcgatgcatcttactctgttta

SEQ ID NO: 3281 - DNA, 25 bp, artificial sequence
  antisense probe sequence
gcatgtctgttttttgacggcatct

SEQ ID NO: 3282 - DNA, 25 bp, artificial sequence
  antisense probe sequence
agggcaattcccttttctgatattg

SEQ ID NO: 3283 - DNA, 25 bp, artificial sequence
  antisense probe sequence
ctgatattgctagctgtgtttcttg

SEQ ID NO: 3284 - DNA, 25 bp, artificial sequence
  antisense probe sequence
gtgtttcttgggttgccactattgc

SEQ ID NO: 3285 - DNA, 25 bp, artificial sequence
  antisense probe sequence
gttgccactattgccactgaatgaa

SEQ ID NO: 3286 - DNA, 25 bp, artificial sequence
  antisense probe sequence
ttcttcacctaaccaggtaatctgc

SEQ ID NO: 3287 - DNA, 25 bp, artificial sequence
  antisense probe sequence
aatctgcagttctcataatcgcttt

SEQ ID NO: 3288 - DNA, 25 bp, artificial sequence
  antisense probe sequence
ataatcgctttgtgctattgatgag

SEQ ID NO: 3289 - DNA, 25 bp, artificial sequence
  antisense probe sequence
gcagtcatatgtttttcaatgctat

SEQ ID NO: 3290 - DNA, 25 bp, artificial sequence
  antisense probe sequence
atgatgctttcgattgttatactaa

SEQ ID NO: 3291 - DNA, 25 bp, artificial sequence
  antisense probe sequence
attctgaagccagaccgtctttcct

SEQ ID NO: 3292 - DNA, 25 bp, artificial sequence
  antisense probe sequence
tcgcagctgggcgaggggacttgga

SEQ ID NO: 3293 - DNA, 25 bp, artificial sequence
  antisense probe sequence
ctgggcgaggggacttggaggacag

SEQ ID NO: 3294 - DNA, 25 bp, artificial sequence
  antisense probe sequence
ggggacttggaggacagggtgaagc

SEQ ID NO: 3295 - DNA, 25 bp, artificial sequence
  antisense probe sequence
acttggaggacagggtgaagctgca

SEQ ID NO: 3296 - DNA, 25 bp, artificial sequence
  antisense probe sequence
tgaagctgcagaagacctggggtgg

SEQ ID NO: 3297 - DNA, 25 bp, artificial sequence
  antisense probe sequence
gctgcagaagacctggggtgggatg

SEQ ID NO: 3298 - DNA, 25 bp, artificial sequence
  antisense probe sequence
tagagaggacgccaaggactgggga

SEQ ID NO: 3299 - DNA, 25 bp, artificial sequence
  antisense probe sequence
agaggacgccaaggactggggaagg

SEQ ID NO: 3300 - DNA, 25 bp, artificial sequence
  antisense probe sequence
ggaagttaggaataccttacatcca

SEQ ID NO: 3301 - DNA, 25 bp, artificial sequence
  antisense probe sequence
aggaataccttacatccaatgccca

SEQ ID NO: 3302 - DNA, 25 bp, artificial sequence
  antisense probe sequence
ctgcaaagcagtattcctcagcctt

SEQ ID NO: 3303 - DNA, 25 bp, artificial sequence
  antisense probe sequence
ggttgggtctttgatatgtggtgat

SEQ ID NO: 3304 - DNA, 25 bp, artificial sequence
  antisense probe sequence
gtgatatcctgggtttcaactcttc

SEQ ID NO: 3305 - DNA, 25 bp, artificial sequence
  antisense probe sequence
gatacagttgttctgtgatttggga

SEQ ID NO: 3306 - DNA, 25 bp, artificial sequence
  antisense probe sequence
ttagatcttgacttaggcatataca

SEQ ID NO: 3307 - DNA, 25 bp, artificial sequence
  antisense probe sequence
aagtctacaatgttatgatgctaca

SEQ ID NO: 3308 - DNA, 25 bp, artificial sequence
  antisense probe sequence
aacgctaggttttatggagactcat

SEQ ID NO: 3309 - DNA, 25 bp, artificial sequence
  antisense probe sequence
aagattttcgtcttactattcaagt

SEQ ID NO: 3310 - DNA, 25 bp, artificial sequence
  antisense probe sequence
atgaagctttataattggtgtgcaa

SEQ ID NO: 3311 - DNA, 25 bp, artificial sequence
  antisense probe sequence
aaaccagacatagaacctgcccttc

SEQ ID NO: 3312 - DNA, 25 bp, artificial sequence
  antisense probe sequence
ttctggactctctggtcaagtgaag

SEQ ID NO: 3313 - DNA, 25 bp, artificial sequence
  antisense probe sequence
ggatattgtaaacacacctcaggga

SEQ ID NO: 3314 - DNA, 25 bp, artificial sequence
  antisense probe sequence
cagacaaacaggccaatccggggga

SEQ ID NO: 3315 - DNA, 25 bp, artificial sequence
  antisense probe sequence
gaaagctctacaatgaggcagattt

SEQ ID NO: 3316 - DNA, 25 bp, artificial sequence
  antisense probe sequence
caagtccttcagctcaagctgcagc

SEQ ID NO: 3317 - DNA, 25 bp, artificial sequence
  antisense probe sequence
gcttcctggttcatgacattacagc

SEQ ID NO: 3318 - DNA, 25 bp, artificial sequence
  antisense probe sequence
cattacagcatggatcgttttcaaa

SEQ ID NO: 3319 - DNA, 25 bp, artificial sequence
  antisense probe sequence
aaaattaatactgcctcctgtttca

SEQ ID NO: 3320 - DNA, 25 bp, artificial sequence
  antisense probe sequence
tactgcctcctgtttcagcagtggc

SEQ ID NO: 3321 - DNA, 25 bp, artificial sequence
  antisense probe sequence
tctccctgtggctcagagtatggga

SEQ ID NO: 3322 - DNA, 25 bp, artificial sequence
  antisense probe sequence
gggagtgagtatgccctgtaaccca

SEQ ID NO: 3323 - DNA, 25 bp, artificial sequence
  antisense probe sequence
gaatcacagagcaatacgggtacct

SEQ ID NO: 3324 - DNA, 25 bp, artificial sequence
  antisense probe sequence
caagactacactttcttgccttctt

SEQ ID NO: 3325 - DNA, 25 bp, artificial sequence
  antisense probe sequence
accttggaactctgttcttgctctt

SEQ ID NO: 3326 - DNA, 25 bp, artificial sequence
  antisense probe sequence
cttgctcttcattccgcatgtgata

SEQ ID NO: 3327 - DNA, 25 bp, artificial sequence
  antisense probe sequence
ttccgcatgtgatactctggtccaa

SEQ ID NO: 3328 - DNA, 25 bp, artificial sequence
  antisense probe sequence
aatatcgtctcagaggtgcttccct

SEQ ID NO: 3329 - DNA, 25 bp, artificial sequence
  antisense probe sequence
agaggtgcttcccttgaaaactcgg

SEQ ID NO: 3330 - DNA, 25 bp, artificial sequence
  antisense probe sequence
actcggtgctgtttccatagttact

SEQ ID NO: 3331 - DNA, 25 bp, artificial sequence
  antisense probe sequence
tagttactctatttgatcactctaa

SEQ ID NO: 3332 - DNA, 25 bp, artificial sequence
  antisense probe sequence
gatcactctaagtttggttgtcttc

SEQ ID NO: 3333 - DNA, 25 bp, artificial sequence
  antisense probe sequence
ccctcctaacgtaaactccatgatt

SEQ ID NO: 3334 - DNA, 25 bp, artificial sequence
  antisense probe sequence
aactccatgattgccaacacctgtt

SEQ ID NO: 3335 - DNA, 25 bp, artificial sequence
  antisense probe sequence
gcagttccagtctcacagaagtctg

SEQ ID NO: 3336 - DNA, 25 bp, artificial sequence
  antisense probe sequence
gaaggtggtcttttcattctactca

SEQ ID NO: 3337 - DNA, 25 bp, artificial sequence
  antisense probe sequence
ttcattctactcaggtcttctattg

SEQ ID NO: 3338 - DNA, 25 bp, artificial sequence
  antisense probe sequence
atacatcatggagggcaatcttctt

SEQ ID NO: 3339 - DNA, 25 bp, artificial sequence
  antisense probe sequence
gggcaatcttctttactcagaggac

SEQ ID NO: 3340 - DNA, 25 bp, artificial sequence
  antisense probe sequence
gtgtcaatgttattcccatccagaa

SEQ ID NO: 3341 - DNA, 25 bp, artificial sequence
  antisense probe sequence
ccatccagaaacaccttccaagttg

SEQ ID NO: 3342 - DNA, 25 bp, artificial sequence
  antisense probe sequence
taacaatacacttttcctcatctca

SEQ ID NO: 3343 - DNA, 25 bp, artificial sequence
  antisense probe sequence
tttcctcatctcacccaaatttagg

SEQ ID NO: 3344 - DNA, 25 bp, artificial sequence
  antisense probe sequence
ttggaatgccacttttacttttgga

SEQ ID NO: 3345 - DNA, 25 bp, artificial sequence
  antisense probe sequence
ggcacactggtttacacctataatc

SEQ ID NO: 3346 - DNA, 25 bp, artificial sequence
  antisense probe sequence
gaaatacacccactctcttggaata

SEQ ID NO: 3347 - DNA, 25 bp, artificial sequence
  antisense probe sequence
atgacgtaccactcagttggaccct

SEQ ID NO: 3348 - DNA, 25 bp, artificial sequence
  antisense probe sequence
gaccctcaagagtcactgctttgtc

SEQ ID NO: 3349 - DNA, 25 bp, artificial sequence
  antisense probe sequence
cgcacgcttccatttgatgcatttg

SEQ ID NO: 3350 - DNA, 25 bp, artificial sequence
  antisense probe sequence
atgtcattgtccttgagaccctaca

SEQ ID NO: 3351 - DNA, 25 bp, artificial sequence
  antisense probe sequence
gagaccctacatgtgcagtttggct

SEQ ID NO: 3352 - DNA, 25 bp, artificial sequence
  antisense probe sequence
tttcctgcaggcttttccatgagta

SEQ ID NO: 3353 - DNA, 25 bp, artificial sequence
  antisense probe sequence
gaacaaatctgtatggcttttcccc

SEQ ID NO: 3354 - DNA, 25 bp, artificial sequence
  antisense probe sequence
gtgaacttgtcctagtatgcttgcc

SEQ ID NO: 3355 - DNA, 25 bp, artificial sequence
  antisense probe sequence
cttgcctcacaaacgttttagccat

SEQ ID NO: 3356 - DNA, 25 bp, artificial sequence
  antisense probe sequence
cttagcctgacagtgtcctgttctc

SEQ ID NO: 3357 - DNA, 25 bp, artificial sequence
  antisense probe sequence
tcatataatatgttgctgcttttgg

SEQ ID NO: 3358 - DNA, 25 bp, artificial sequence
  antisense probe sequence
gggggtgttggggagtaccagagag

SEQ ID NO: 3359 - DNA, 25 bp, artificial sequence
  antisense probe sequence
gcatgcatctgcagtgtacactggc

SEQ ID NO: 3360 - DNA, 25 bp, artificial sequence
  antisense probe sequence
gcaaacaaaaggtttgtcattcccg

SEQ ID NO: 3361 - DNA, 25 bp, artificial sequence
  antisense probe sequence
ggatgcaggtgtagtcttgtgccag

SEQ ID NO: 3362 - DNA, 25 bp, artificial sequence
  antisense probe sequence
gtagtcttgtgccagtctgtgacat

SEQ ID NO: 3363 - DNA, 25 bp, artificial sequence
  antisense probe sequence
gtgacataacacctgaacaatttct

SEQ ID NO: 3364 - DNA, 25 bp, artificial sequence
  antisense probe sequence
gaacaatttctatggtatcctaccc

SEQ ID NO: 3365 - DNA, 25 bp, artificial sequence
  antisense probe sequence
tatcctacccatttgctcagattca

SEQ ID NO: 3366 - DNA, 25 bp, artificial sequence
  antisense probe sequence
gctcagattcaaaccaggccttaat

SEQ ID NO: 3367 - DNA, 25 bp, artificial sequence
  antisense probe sequence
accaggccttaatcgataacaagca

SEQ ID NO: 3368 - DNA, 25 bp, artificial sequence
  antisense probe sequence
tacatttcacatttaccagcaagtc

SEQ ID NO: 3369 - DNA, 25 bp, artificial sequence
  antisense probe sequence
aatagtgcttatttacatagtcaat

SEQ ID NO: 3370 - DNA, 25 bp, artificial sequence
  antisense probe sequence
atcttcgatctgcccaatatttaat

SEQ ID NO: 3371 - DNA, 25 bp, artificial sequence
  antisense probe sequence
gatatgcctatgtttctttaactat

SEQ ID NO: 3372 - DNA, 25 bp, artificial sequence
  antisense probe sequence
tctttaactatacagcctctttaca

SEQ ID NO: 3373 - DNA, 25 bp, artificial sequence
  antisense probe sequence
gtattgcaacctgctatttagcctt

SEQ ID NO: 3374 - DNA, 25 bp, artificial sequence
  antisense probe sequence
atttagcctttggtgccttagaatt

SEQ ID NO: 3375 - DNA, 25 bp, artificial sequence
  antisense probe sequence
tttctctattcactttttattgctc

SEQ ID NO: 3376 - DNA, 25 bp, artificial sequence
  antisense probe sequence
attgctcttgctttctattgctact

SEQ ID NO: 3377 - DNA, 25 bp, artificial sequence
  antisense probe sequence
gctactaaagcctcttttatccagc

SEQ ID NO: 3378 - DNA, 25 bp, artificial sequence
  antisense probe sequence
gtaatagttccaacattgtagcgaa

SEQ ID NO: 3379 - DNA, 25 bp, artificial sequence
  antisense probe sequence
tatcatcatatatttgtcctctagc

SEQ ID NO: 3380 - DNA, 25 bp, artificial sequence
  antisense probe sequence
ttgtcctctagcatgtataacacca

SEQ ID NO: 3381 - DNA, 25 bp, artificial sequence
  antisense probe sequence
agaggggactctaatgtaaaccatg

SEQ ID NO: 3382 - DNA, 25 bp, artificial sequence
  antisense probe sequence
gatgtttcagagtaggttcattgat

SEQ ID NO: 3383 - DNA, 25 bp, artificial sequence
  antisense probe sequence
aaataatcctcagtacagccaagct

SEQ ID NO: 3384 - DNA, 25 bp, artificial sequence
  antisense probe sequence
gtacagccaagctgaggctttacag

SEQ ID NO: 3385 - DNA, 25 bp, artificial sequence
  antisense probe sequence
ttgactatttgggactgctgcttta

SEQ ID NO: 3386 - DNA, 25 bp, artificial sequence
  antisense probe sequence
ttcaccatagaaacatcctccacag

SEQ ID NO: 3387 - DNA, 25 bp, artificial sequence
  antisense probe sequence
aaattctgttgccattacattcaat

SEQ ID NO: 3388 - DNA, 25 bp, artificial sequence
  antisense probe sequence
cattcaatttccaatatccagcaaa

SEQ ID NO: 3389 - DNA, 25 bp, artificial sequence
  antisense probe sequence
aaacttccaatcttaatattaatct

SEQ ID NO: 3390 - DNA, 25 bp, artificial sequence
  antisense probe sequence
atgccagaattaccaaaagtcacga

SEQ ID NO: 3391 - DNA, 25 bp, artificial sequence
  antisense probe sequence
agtagagattacccagcattcagct

SEQ ID NO: 3392 - DNA, 25 bp, artificial sequence
  antisense probe sequence
cagctcaccatttgaaaccagccaa

SEQ ID NO: 3393 - DNA, 25 bp, artificial sequence
  antisense probe sequence
agtgttactcaatctggaagttgca

SEQ ID NO: 3394 - DNA, 25 bp, artificial sequence
  antisense probe sequence
gttgcaatgagcttgacaatgtcaa

SEQ ID NO: 3395 - DNA, 25 bp, artificial sequence
  antisense probe sequence
gagattctcaatgaacctctaatgt

SEQ ID NO: 3396 - DNA, 25 bp, artificial sequence
  antisense probe sequence
gaacctctaatgttttaccttcaat

SEQ ID NO: 3397 - DNA, 25 bp, artificial sequence
  antisense probe sequence
aagattacccaaattctaccatcat

SEQ ID NO: 3398 - DNA, 25 bp, artificial sequence
  antisense probe sequence
tctaccatcattttgccactgggat

SEQ ID NO: 3399 - DNA, 25 bp, artificial sequence
  antisense probe sequence
ggatgaccattattattcctggact

SEQ ID NO: 3400 - DNA, 25 bp, artificial sequence
  antisense probe sequence
tgtacacgattctcataaacccaat

SEQ ID NO: 3401 - DNA, 25 bp, artificial sequence
  antisense probe sequence
tgcccccctaggtgctaataaaagg

SEQ ID NO: 3402 - DNA, 25 bp, artificial sequence
  antisense probe sequence
gagtgtagtgatcttgtgcaaaaaa

SEQ ID NO: 3403 - DNA, 25 bp, artificial sequence
  antisense probe sequence
atgaacatttgtgagcttcttgctg

SEQ ID NO: 3404 - DNA, 25 bp, artificial sequence
  antisense probe sequence
acatttgtgagcttcttgctgtttt

SEQ ID NO: 3405 - DNA, 25 bp, artificial sequence
  antisense probe sequence
tgagcttcttgctgttttatagatt

SEQ ID NO: 3406 - DNA, 25 bp, artificial sequence
  antisense probe sequence
ttgttgttcttgttgcgaaggtttc

SEQ ID NO: 3407 - DNA, 25 bp, artificial sequence
  antisense probe sequence
gttcttgttgcgaaggtttcaaata

SEQ ID NO: 3408 - DNA, 25 bp, artificial sequence
  antisense probe sequence
tatttgtgactgaatgtacggtgaa

SEQ ID NO: 3409 - DNA, 25 bp, artificial sequence
  antisense probe sequence
gactgaatgtacggtgaaactgtca

SEQ ID NO: 3410 - DNA, 25 bp, artificial sequence
  antisense probe sequence
gaaactgtcataatgttacctagct

SEQ ID NO: 3411 - DNA, 25 bp, artificial sequence
  antisense probe sequence
atgttacctagctgagttttgttat

SEQ ID NO: 3412 - DNA, 25 bp, artificial sequence
  antisense probe sequence
cccagccgctataacttttaacaat

SEQ ID NO: 3413 - DNA, 25 bp, artificial sequence
  antisense probe sequence
acaattcccatatgtcctttattcc

SEQ ID NO: 3414 - DNA, 25 bp, artificial sequence
  antisense probe sequence
tatgtcctttattccactaagatga

SEQ ID NO: 3415 - DNA, 25 bp, artificial sequence
  antisense probe sequence
atgagtgcagtatatatttccatct

SEQ ID NO: 3416 - DNA, 25 bp, artificial sequence
  antisense probe sequence
atatttccatctgtccaaggcttcc

SEQ ID NO: 3417 - DNA, 25 bp, artificial sequence
  antisense probe sequence
gggcatttggggaatccaggctgtg

SEQ ID NO: 3418 - DNA, 25 bp, artificial sequence
  antisense probe sequence
ccaggctgtgattcagggaagttcc

SEQ ID NO: 3419 - DNA, 25 bp, artificial sequence
  antisense probe sequence
aagttccaagtgtctgatgaagtgt

SEQ ID NO: 3420 - DNA, 25 bp, artificial sequence
  antisense probe sequence
ttgttttacatctttgtgtcccttg

SEQ ID NO: 3421 - DNA, 25 bp, artificial sequence
  antisense probe sequence
ccttgcaggtctagcactgtgctat

SEQ ID NO: 3422 - DNA, 25 bp, artificial sequence
  antisense probe sequence
gtgctatgtaggtaacatgtgctcc

SEQ ID NO: 3423 - DNA, 25 bp, artificial sequence
  antisense probe sequence
gaggagcctgctttgcccagcctgg

SEQ ID NO: 3424 - DNA, 25 bp, artificial sequence
  antisense probe sequence
aggagcctgctttgcccagcctgga

SEQ ID NO: 3425 - DNA, 25 bp, artificial sequence
  antisense probe sequence
agtacaccatctacatcgcacctgg

SEQ ID NO: 3426 - DNA, 25 bp, artificial sequence
  antisense probe sequence
acaccatctacatcgcacctggagg

SEQ ID NO: 3427 - DNA, 25 bp, artificial sequence
  antisense probe sequence
attctggaaggtgtcccggccactg

SEQ ID NO: 3428 - DNA, 25 bp, artificial sequence
  antisense probe sequence
ccactggagctgtgctatgctccca

SEQ ID NO: 3429 - DNA, 25 bp, artificial sequence
  antisense probe sequence
cactggagctgtgctatgctcccac

SEQ ID NO: 3430 - DNA, 25 bp, artificial sequence
  antisense probe sequence
cccaccaggggacagccagaggaag

SEQ ID NO: 3431 - DNA, 25 bp, artificial sequence
  antisense probe sequence
gaccatggggtatccctgtgtcctg

SEQ ID NO: 3432 - DNA, 25 bp, artificial sequence
  antisense probe sequence
tatccctgtgtcctggtctatcacc

SEQ ID NO: 3433 - DNA, 25 bp, artificial sequence
  antisense probe sequence
gcccagccagccaataagaggacac

SEQ ID NO: 3434 - DNA, 25 bp, artificial sequence
  antisense probe sequence
ccagccaataagaggacacaaatga

SEQ ID NO: 3435 - DNA, 25 bp, artificial sequence
  antisense probe sequence
gacacaaatgaggacacgtggcttt

SEQ ID NO: 3436 - DNA, 25 bp, artificial sequence
  antisense probe sequence
cacgtggcttttatacaaagtatct

SEQ ID NO: 3437 - DNA, 25 bp, artificial sequence
  antisense probe sequence
ctgcaacgtcccatctatacgaggt

SEQ ID NO: 3438 - DNA, 25 bp, artificial sequence
  antisense probe sequence
caacgtcccatctatacgaggtgtt

SEQ ID NO: 3439 - DNA, 25 bp, artificial sequence
  antisense probe sequence
ggccacaaatggagggattgtcctt

SEQ ID NO: 3440 - DNA, 25 bp, artificial sequence
  antisense probe sequence
gtcctttcaagcaccacagcttcag

SEQ ID NO: 3441 - DNA, 25 bp, artificial sequence
  antisense probe sequence
ttatattggagactcaactgccctt

SEQ ID NO: 3442 - DNA, 25 bp, artificial sequence
  antisense probe sequence
ttagaaagtcttagcatcagatcat

SEQ ID NO: 3443 - DNA, 25 bp, artificial sequence
  antisense probe sequence
gaaagtcttagcatcagatcataaa

SEQ ID NO: 3444 - DNA, 25 bp, artificial sequence
  antisense probe sequence
cccatctgaaacttcccaggggagt

SEQ ID NO: 3445 - DNA, 25 bp, artificial sequence
  antisense probe sequence
ccatctgaaacttcccaggggagtt

SEQ ID NO: 3446 - DNA, 25 bp, artificial sequence
  antisense probe sequence
ttcccaggggagttgggattcttag

SEQ ID NO: 3447 - DNA, 25 bp, artificial sequence
  antisense probe sequence
tcccaggggagttgggattcttagt

SEQ ID NO: 3448 - DNA, 25 bp, artificial sequence
  antisense probe sequence
aaggggctcattttctactgcattt

SEQ ID NO: 3449 - DNA, 25 bp, artificial sequence
  antisense probe sequence
gggctcattttctactgcatttccc

SEQ ID NO: 3450 - DNA, 25 bp, artificial sequence
  antisense probe sequence
tcccatttttggtatcttgttcagc

SEQ ID NO: 3451 - DNA, 25 bp, artificial sequence
  antisense probe sequence
cccatttttggtatcttgttcagca

SEQ ID NO: 3452 - DNA, 25 bp, artificial sequence
  antisense probe sequence
catttttggtatcttgttcagcatg

SEQ ID NO: 3453 - DNA, 25 bp, artificial sequence
  antisense probe sequence
ccattctgagtacttctccgcaaac

SEQ ID NO: 3454 - DNA, 25 bp, artificial sequence
  antisense probe sequence
gactgttttacatgaagggtgcaaa

SEQ ID NO: 3455 - DNA, 25 bp, artificial sequence
  antisense probe sequence
gaaccctagggtgaaacacgtgaca

SEQ ID NO: 3456 - DNA, 25 bp, artificial sequence
  antisense probe sequence
tattgaatagtcctcttctctaccc

SEQ ID NO: 3457 - DNA, 25 bp, artificial sequence
  antisense probe sequence
aagagatgagcattcaagtcaggca

SEQ ID NO: 3458 - DNA, 25 bp, artificial sequence
  antisense probe sequence
tgaatttgggtcaaggctgcgccac

SEQ ID NO: 3459 - DNA, 25 bp, artificial sequence
  antisense probe sequence
aggctgcgccactcaaaagctatat

SEQ ID NO: 3460 - DNA, 25 bp, artificial sequence
  antisense probe sequence
atatgacctctatatgagcagctta

SEQ ID NO: 3461 - DNA, 25 bp, artificial sequence
  antisense probe sequence
tattcaacctcttttaacctccatt

SEQ ID NO: 3462 - DNA, 25 bp, artificial sequence
  antisense probe sequence
aacctccattttgtcatctgtagaa

SEQ ID NO: 3463 - DNA, 25 bp, artificial sequence
  antisense probe sequence
taaatgcctagctcagaaggattcc

SEQ ID NO: 3464 - DNA, 25 bp, artificial sequence
  antisense probe sequence
aaactccagggctcattagtccttt

SEQ ID NO: 3465 - DNA, 25 bp, artificial sequence
  antisense probe sequence
aaatgatgggtatccgtgtgcctgg

SEQ ID NO: 3466 - DNA, 25 bp, artificial sequence
  antisense probe sequence
tggtccaagtttcctggtggttgac

SEQ ID NO: 3467 - DNA, 25 bp, artificial sequence
  antisense probe sequence
taagacatgttctgcagagttctcc

SEQ ID NO: 3468 - DNA, 25 bp, artificial sequence
  antisense probe sequence
gtaatattccgtttgttttgctcct

SEQ ID NO: 3469 - DNA, 25 bp, artificial sequence
  antisense probe sequence
gagcaacgatcattttcctagtcaa

SEQ ID NO: 3470 - DNA, 25 bp, artificial sequence
  antisense probe sequence
gcattaaactataaatcctccctcc

SEQ ID NO: 3471 - DNA, 25 bp, artificial sequence
  antisense probe sequence
atgacaatgcctactgggctcagct

SEQ ID NO: 3472 - DNA, 25 bp, artificial sequence
  antisense probe sequence
tgagtctgactgagccttcttagca

SEQ ID NO: 3473 - DNA, 25 bp, artificial sequence
  antisense probe sequence
ccaggtattttcagcagaggttctt

SEQ ID NO: 3474 - DNA, 25 bp, artificial sequence
  antisense probe sequence
tacttttctgtaattgaggcgcaac

SEQ ID NO: 3475 - DNA, 25 bp, artificial sequence
  antisense probe sequence
aaatgcagataaaggctacctctga

SEQ ID NO: 3476 - DNA, 25 bp, artificial sequence
  antisense probe sequence
taaaggctacctctgaattctcaat

SEQ ID NO: 3477 - DNA, 25 bp, artificial sequence
  antisense probe sequence
aaaggctacctctgaattctcaata

SEQ ID NO: 3478 - DNA, 25 bp, artificial sequence
  antisense probe sequence
aggctacctctgaattctcaataga

SEQ ID NO: 3479 - DNA, 25 bp, artificial sequence
  antisense probe sequence
gaattctcaatagattcatcatgtt

SEQ ID NO: 3480 - DNA, 25 bp, artificial sequence
  antisense probe sequence
aatagattcatcatgtttgctctta

SEQ ID NO: 3481 - DNA, 25 bp, artificial sequence
  antisense probe sequence
gattcatcatgtttgctcttaagtg

SEQ ID NO: 3482 - DNA, 25 bp, artificial sequence
  antisense probe sequence
tcatcatgtttgctcttaagtgtag

SEQ ID NO: 3483 - DNA, 25 bp, artificial sequence
  antisense probe sequence
gtttgctcttaagtgtagctgtcca

SEQ ID NO: 3484 - DNA, 25 bp, artificial sequence
  antisense probe sequence
tgctcttaagtgtagctgtccacac

SEQ ID NO: 3485 - DNA, 25 bp, artificial sequence
  antisense probe sequence
ctcttaagtgtagctgtccacactg

SEQ ID NO: 3486 - DNA, 25 bp, artificial sequence
  antisense probe sequence
taccatagcaagttcttatcctttg

SEQ ID NO: 3487 - DNA, 25 bp, artificial sequence
  antisense probe sequence
acctgtcacagtaatatgccaattt

SEQ ID NO: 3488 - DNA, 25 bp, artificial sequence
  antisense probe sequence
gccaatttttggtgtcgctttagta

SEQ ID NO: 3489 - DNA, 25 bp, artificial sequence
  antisense probe sequence
gtctttcctcagttgtctcctaaaa

SEQ ID NO: 3490 - DNA, 25 bp, artificial sequence
  antisense probe sequence
gatcgtcttgtgcagccctttaaaa

SEQ ID NO: 3491 - DNA, 25 bp, artificial sequence
  antisense probe sequence
atgcgttttgcattcatgtctttgc

SEQ ID NO: 3492 - DNA, 25 bp, artificial sequence
  antisense probe sequence
ctttcattttgggagtgactgtcat

SEQ ID NO: 3493 - DNA, 25 bp, artificial sequence
  antisense probe sequence
acaccagggccagattgcgtgggtt

SEQ ID NO: 3494 - DNA, 25 bp, artificial sequence
  antisense probe sequence
tgcgtgggttctagctagggaccta

SEQ ID NO: 3495 - DNA, 25 bp, artificial sequence
  antisense probe sequence
agctggttacttgatttctctctgt

SEQ ID NO: 3496 - DNA, 25 bp, artificial sequence
  antisense probe sequence
ttctctctgttccatttactatctg

SEQ ID NO: 3497 - DNA, 25 bp, artificial sequence
  antisense probe sequence
gggcaggacatgctgtaccaatccc

SEQ ID NO: 3498 - DNA, 25 bp, artificial sequence
  antisense probe sequence
taccaatccctgaagctcactaatg

SEQ ID NO: 3499 - DNA, 25 bp, artificial sequence
  antisense probe sequence
tggccgaactacgtatccagccagg

SEQ ID NO: 3500 - DNA, 25 bp, artificial sequence
  antisense probe sequence
cagccaggaaaccccaattacacgc

SEQ ID NO: 3501 - DNA, 25 bp, artificial sequence
  antisense probe sequence
gagctcctgaagtctctcaatacat

SEQ ID NO: 3502 - DNA, 25 bp, artificial sequence
  antisense probe sequence
atacatctatcaggtctacgacagc

SEQ ID NO: 3503 - DNA, 25 bp, artificial sequence
  antisense probe sequence
caagactggtccagtacccttcaac

SEQ ID NO: 3504 - DNA, 25 bp, artificial sequence
  antisense probe sequence
acccttcaaccatgctgtgatcggt

SEQ ID NO: 3505 - DNA, 25 bp, artificial sequence
  antisense probe sequence
gtaactagtctaacctgtgctaaca

SEQ ID NO: 3506 - DNA, 25 bp, artificial sequence
  antisense probe sequence
gatagttttagcttcctgtgaacat

SEQ ID NO: 3507 - DNA, 25 bp, artificial sequence
  antisense probe sequence
gccaatggctggctttttctacacc

SEQ ID NO: 3508 - DNA, 25 bp, artificial sequence
  antisense probe sequence
tgtgccttcattcatgggttaatgg

SEQ ID NO: 3509 - DNA, 25 bp, artificial sequence
  antisense probe sequence
aatgggttatcacaggaatgggact

SEQ ID NO: 3510 - DNA, 25 bp, artificial sequence
  antisense probe sequence
agagaactgagctagcatgcccagc

SEQ ID NO: 3511 - DNA, 25 bp, artificial sequence
  antisense probe sequence
cccacagagagcctccactagagtg

SEQ ID NO: 3512 - DNA, 25 bp, artificial sequence
  antisense probe sequence
gagcctccactagagtgatgctaag

SEQ ID NO: 3513 - DNA, 25 bp, artificial sequence
  antisense probe sequence
gtctagtgtctagtggatccaggcc

SEQ ID NO: 3514 - DNA, 25 bp, artificial sequence
  antisense probe sequence
ggatccaggccacaggagagagtgc

SEQ ID NO: 3515 - DNA, 25 bp, artificial sequence
  antisense probe sequence
aactgtggagtcagtggcagcatgc

SEQ ID NO: 3516 - DNA, 25 bp, artificial sequence
  antisense probe sequence
aaagctttaggcaccagcctgcaac

SEQ ID NO: 3517 - DNA, 25 bp, artificial sequence
  antisense probe sequence
cgagcagccacgtaggctgcaccca

SEQ ID NO: 3518 - DNA, 25 bp, artificial sequence
  antisense probe sequence
ccttcccaggctgatctgaggtaaa

SEQ ID NO: 3519 - DNA, 25 bp, artificial sequence
  antisense probe sequence
aaagcctgagacagctgccttgtgt

SEQ ID NO: 3520 - DNA, 25 bp, artificial sequence
  antisense probe sequence
cgactgagatgcacagctgccttgt

SEQ ID NO: 3521 - DNA, 25 bp, artificial sequence
  antisense probe sequence
gctgccttgtgtgcgactgagatgc

SEQ ID NO: 3522 - DNA, 25 bp, artificial sequence
  antisense probe sequence
tgagatgcaggatttcctcacgcct

SEQ ID NO: 3523 - DNA, 25 bp, artificial sequence
  antisense probe sequence
atgtgtcttaggggactctggcttc

SEQ ID NO: 3524 - DNA, 25 bp, artificial sequence
  antisense probe sequence
ggcttctctttttgcaagggcctct

SEQ ID NO: 3525 - DNA, 25 bp, artificial sequence
  antisense probe sequence
tctgtctgtgtccctgttagcacaa

SEQ ID NO: 3526 - DNA, 25 bp, artificial sequence
  antisense probe sequence
agagaaacagtccacctctgtgtct

SEQ ID NO: 3527 - DNA, 25 bp, artificial sequence
  antisense probe sequence
tgggcagagtgcggcagctcatgcc

SEQ ID NO: 3528 - DNA, 25 bp, artificial sequence
  antisense probe sequence
gtgagccaggattgtgcgactgcac

SEQ ID NO: 3529 - DNA, 25 bp, artificial sequence
  antisense probe sequence
gggtgacagggtgaaacgccatctc

SEQ ID NO: 3530 - DNA, 25 bp, artificial sequence
  antisense probe sequence
atactgaggtggatccctgcatcct

SEQ ID NO: 3531 - DNA, 25 bp, artificial sequence
  antisense probe sequence
ccctgcatcctcaacaacaatgtgc

SEQ ID NO: 3532 - DNA, 25 bp, artificial sequence
  antisense probe sequence
gaagcagctttacctacttgtttct

SEQ ID NO: 3533 - DNA, 25 bp, artificial sequence
  antisense probe sequence
cttagcctctgacttcctaatgtag

SEQ ID NO: 3534 - DNA, 25 bp, artificial sequence
  antisense probe sequence
ggaggtggtcagcaggcaatctcct

SEQ ID NO: 3535 - DNA, 25 bp, artificial sequence
  antisense probe sequence
ggcaatctcctgggccttaaaggat

SEQ ID NO: 3536 - DNA, 25 bp, artificial sequence
  antisense probe sequence
aaaggatgcggactcatcctcagcc

SEQ ID NO: 3537 - DNA, 25 bp, artificial sequence
  antisense probe sequence
ccagcgcccatgttgtgatacaggg

SEQ ID NO: 3538 - DNA, 25 bp, artificial sequence
  antisense probe sequence
gaaaaactcaggcccatccattttc

SEQ ID NO: 3539 - DNA, 25 bp, artificial sequence
  antisense probe sequence
aattgaggccttttcgatagtttcg

SEQ ID NO: 3540 - DNA, 25 bp, artificial sequence
  antisense probe sequence
aaatggcctcctggcgtaagctttt

SEQ ID NO: 3541 - DNA, 25 bp, artificial sequence
  antisense probe sequence
gtgttctcctactgcaaatattttc

SEQ ID NO: 3542 - DNA, 25 bp, artificial sequence
  antisense probe sequence
ggttttctcttcatgtaagtccttg

SEQ ID NO: 3543 - DNA, 25 bp, artificial sequence
  antisense probe sequence
tgttcttagcactttaattcctgtc

SEQ ID NO: 3544 - DNA, 25 bp, artificial sequence
  antisense probe sequence
gctgaaactggtctactgtgtctct

SEQ ID NO: 3545 - DNA, 25 bp, artificial sequence
  antisense probe sequence
gaaagggttgctgctgtcagccttg

SEQ ID NO: 3546 - DNA, 25 bp, artificial sequence
  antisense probe sequence
caaccctgtgatcagaacctccaaa

SEQ ID NO: 3547 - DNA, 25 bp, artificial sequence
  antisense probe sequence
agatagggatattggcccctcactg

SEQ ID NO: 3548 - DNA, 25 bp, artificial sequence
  antisense probe sequence
cactctcagccatagcactttgttc

SEQ ID NO: 3549 - DNA, 25 bp, artificial sequence
  antisense probe sequence
actttgttcactgtcctgtgtcaga

SEQ ID NO: 3550 - DNA, 25 bp, artificial sequence
  antisense probe sequence
tgtgtcagagcactgagctccaccc

SEQ ID NO: 3551 - DNA, 25 bp, artificial sequence
  antisense probe sequence
agctccacccttttctgagagttat

SEQ ID NO: 3552 - DNA, 25 bp, artificial sequence
  antisense probe sequence
gtattcttactatggttgcctttcc

SEQ ID NO: 3553 - DNA, 25 bp, artificial sequence
  antisense probe sequence
ttgcctttccctatttgttcaatag

SEQ ID NO: 3554 - DNA, 25 bp, artificial sequence
  antisense probe sequence
atgtagtaatcttctagaccgctta

SEQ ID NO: 3555 - DNA, 25 bp, artificial sequence
  antisense probe sequence
agaccgcttaaaaccaatgctccca

SEQ ID NO: 3556 - DNA, 25 bp, artificial sequence
  antisense probe sequence
caatgctcccaagctgaatattctt

SEQ ID NO: 3557 - DNA, 25 bp, artificial sequence
  antisense probe sequence
gagatcattaacatgccagggcagt

SEQ ID NO: 3558 - DNA, 25 bp, artificial sequence
  antisense probe sequence
ccagggcagttcccactgatttaga

SEQ ID NO: 3559 - DNA, 25 bp, artificial sequence
  antisense probe sequence
aacagttctctgtcatcgtttaaca

SEQ ID NO: 3560 - DNA, 25 bp, artificial sequence
  antisense probe sequence
acaactgacacaactccttaagctg

SEQ ID NO: 3561 - DNA, 25 bp, artificial sequence
  antisense probe sequence
taagctgtggtttcagtctctgcta

SEQ ID NO: 3562 - DNA, 25 bp, artificial sequence
  antisense probe sequence
gtctctgctagttcatattgcatgt

SEQ ID NO: 3563 - DNA, 25 bp, artificial sequence
  antisense probe sequence
gatctggtgcggaacctgcaaagtg

SEQ ID NO: 3564 - DNA, 25 bp, artificial sequence
  antisense probe sequence
cccagaatgtggagcggatcctggc

SEQ ID NO: 3565 - DNA, 25 bp, artificial sequence
  antisense probe sequence
gaaaacttggaacatctccgcaaca

SEQ ID NO: 3566 - DNA, 25 bp, artificial sequence
  antisense probe sequence
gaacatctccgcaacaagacagagg

SEQ ID NO: 3567 - DNA, 25 bp, artificial sequence
  antisense probe sequence
gaggatctggaagccacatctgagc

SEQ ID NO: 3568 - DNA, 25 bp, artificial sequence
  antisense probe sequence
aagccacatctgagcacttcaagac

SEQ ID NO: 3569 - DNA, 25 bp, artificial sequence
  antisense probe sequence
gagcacttcaagacgacatcgcaga

SEQ ID NO: 3570 - DNA, 25 bp, artificial sequence
  antisense probe sequence
gacgacatcgcagaaggtggctcga

SEQ ID NO: 3571 - DNA, 25 bp, artificial sequence
  antisense probe sequence
aaggtggctcgaaaattctggtgga

SEQ ID NO: 3572 - DNA, 25 bp, artificial sequence
  antisense probe sequence
gatgattgtccttatctgcgtgatt

SEQ ID NO: 3573 - DNA, 25 bp, artificial sequence
  antisense probe sequence
ccactggtgccttctcttaaagtaa

SEQ ID NO: 3574 - DNA, 25 bp, artificial sequence
  antisense probe sequence
gggggccacagggtgggctgtggag

SEQ ID NO: 3575 - DNA, 25 bp, artificial sequence
  antisense probe sequence
tgtggagctctcaggaagggccctg

SEQ ID NO: 3576 - DNA, 25 bp, artificial sequence
  antisense probe sequence
ctgaggaaggcacacttgctcctgt

SEQ ID NO: 3577 - DNA, 25 bp, artificial sequence
  antisense probe sequence
tgaggggcttcacgagaggccacag

SEQ ID NO: 3578 - DNA, 25 bp, artificial sequence
  antisense probe sequence
gcctgctcaccatctcagtgagggg

SEQ ID NO: 3579 - DNA, 25 bp, artificial sequence
  antisense probe sequence
cccacccattgaagtctccttgggc

SEQ ID NO: 3580 - DNA, 25 bp, artificial sequence
  antisense probe sequence
gtctccttgggccaccaaaggtggt

SEQ ID NO: 3581 - DNA, 25 bp, artificial sequence
  antisense probe sequence
tggccatggtaccggggacttggga

SEQ ID NO: 3582 - DNA, 25 bp, artificial sequence
  antisense probe sequence
agaggagagggatgtcgggggggtg

SEQ ID NO: 3583 - DNA, 25 bp, artificial sequence
  antisense probe sequence
gaaatggggtgaacggtgctggcag

SEQ ID NO: 3584 - DNA, 25 bp, artificial sequence
  antisense probe sequence
gtgctggcagttcggctagatttct

SEQ ID NO: 3585 - DNA, 25 bp, artificial sequence
  antisense probe sequence
aacttaagatggacacagctgactg

SEQ ID NO: 3586 - DNA, 25 bp, artificial sequence
  antisense probe sequence
agatggacacagctgactggacccc

SEQ ID NO: 3587 - DNA, 25 bp, artificial sequence
  antisense probe sequence
cacttctatgtctctggaccacagg

SEQ ID NO: 3588 - DNA, 25 bp, artificial sequence
  antisense probe sequence
ggcaagtgggctgatggggtccgcc

SEQ ID NO: 3589 - DNA, 25 bp, artificial sequence
  antisense probe sequence
gtctcctggacaaggagtttccagc

SEQ ID NO: 3590 - DNA, 25 bp, artificial sequence
  antisense probe sequence
cctggacaaggagtttccagctgct

SEQ ID NO: 3591 - DNA, 25 bp, artificial sequence
  antisense probe sequence
ggctggagtctcaggccaaattgca

SEQ ID NO: 3592 - DNA, 25 bp, artificial sequence
  antisense probe sequence
aggccaaattgcagagggtcctcca

SEQ ID NO: 3593 - DNA, 25 bp, artificial sequence
  antisense probe sequence
cagggtcctgaagagcactggacta

SEQ ID NO: 3594 - DNA, 25 bp, artificial sequence
  antisense probe sequence
cctgaagagcactggactaagagtc

SEQ ID NO: 3595 - DNA, 25 bp, artificial sequence
  antisense probe sequence
actaagagtctagtggttccagggc

SEQ ID NO: 3596 - DNA, 25 bp, artificial sequence
  antisense probe sequence
ttctggctggaacggacgatgcccc

SEQ ID NO: 3597 - DNA, 25 bp, artificial sequence
  antisense probe sequence
ggatcttgttactgaataccacggg

SEQ ID NO: 3598 - DNA, 25 bp, artificial sequence
  antisense probe sequence
ggtgtgtctaagggactggctgaga

SEQ ID NO: 3599 - DNA, 25 bp, artificial sequence
  antisense probe sequence
actacagtgaacgactctgcctcgt

SEQ ID NO: 3600 - DNA, 25 bp, artificial sequence
  antisense probe sequence
gactctgcctcgtcagtgagattcc

SEQ ID NO: 3601 - DNA, 25 bp, artificial sequence
  antisense probe sequence
gttacaccctaaagcctgaaacctg

SEQ ID NO: 3602 - DNA, 25 bp, artificial sequence
  antisense probe sequence
aaccccaatcctctgacagaagaac

SEQ ID NO: 3603 - DNA, 25 bp, artificial sequence
  antisense probe sequence
ggtcctgtagccctaagtggtacta

SEQ ID NO: 3604 - DNA, 25 bp, artificial sequence
  antisense probe sequence
gtggtactaactttccttcattcaa

SEQ ID NO: 3605 - DNA, 25 bp, artificial sequence
  antisense probe sequence
ggctgatttggaattttgtgccccc

SEQ ID NO: 3606 - DNA, 25 bp, artificial sequence
  antisense probe sequence
aattttgtgcccccatgtaagcacc

SEQ ID NO: 3607 - DNA, 25 bp, artificial sequence
  antisense probe sequence
gcaaacatccggaagtatcccacca

SEQ ID NO: 3608 - DNA, 25 bp, artificial sequence
  antisense probe sequence
tatcccaccaagaaacaacagctcc

SEQ ID NO: 3609 - DNA, 25 bp, artificial sequence
  antisense probe sequence
tatttccagttacttgcctgcattc

SEQ ID NO: 3610 - DNA, 25 bp, artificial sequence
  antisense probe sequence
taataggtttgcccttgcatctcat

SEQ ID NO: 3611 - DNA, 25 bp, artificial sequence
  antisense probe sequence
gggactgtggtccattgtacaagcc

SEQ ID NO: 3612 - DNA, 25 bp, artificial sequence
  antisense probe sequence
gaatttgggtacatggactacgccc

SEQ ID NO: 3613 - DNA, 25 bp, artificial sequence
  antisense probe sequence
ggactacgcccaagcaaggtttgat

SEQ ID NO: 3614 - DNA, 25 bp, artificial sequence
  antisense probe sequence
gaagcttggggtgtgactgtgggga

SEQ ID NO: 3615 - DNA, 25 bp, artificial sequence
  antisense probe sequence
acctcatcactggactgcatgggga

SEQ ID NO: 3616 - DNA, 25 bp, artificial sequence
  antisense probe sequence
gtggcaggaggctttgggtggctca

SEQ ID NO: 3617 - DNA, 25 bp, artificial sequence
  antisense probe sequence
tttgggtggctcactactgaacaca

SEQ ID NO: 3618 - DNA, 25 bp, artificial sequence
  antisense probe sequence
tgtagatggcgactgtgttatagac

SEQ ID NO: 3619 - DNA, 25 bp, artificial sequence
  antisense probe sequence
tgttatagacggtgctcactcccaa

SEQ ID NO: 3620 - DNA, 25 bp, artificial sequence
  antisense probe sequence
gatgtactgcaaagtcgccagtcac

SEQ ID NO: 3621 - DNA, 25 bp, artificial sequence
  antisense probe sequence
gccagtcactgcgtgcaaggtggcc

SEQ ID NO: 3622 - DNA, 25 bp, artificial sequence
  antisense probe sequence
agcagctggattgctctggagcagc

SEQ ID NO: 3623 - DNA, 25 bp, artificial sequence
  antisense probe sequence
tgtgcagacagccatgcgtggccac

SEQ ID NO: 3624 - DNA, 25 bp, artificial sequence
  antisense probe sequence
tgcctggagtgtcggatcctgtgag

SEQ ID NO: 3625 - DNA, 25 bp, artificial sequence
  antisense probe sequence
gagtgtcggatcctgtgagtaggct

SEQ ID NO: 3626 - DNA, 25 bp, artificial sequence
  antisense probe sequence
ccctgacatcatcattcttgtggga

SEQ ID NO: 3627 - DNA, 25 bp, artificial sequence
  antisense probe sequence
gggagacagcagcctgtatgtggtg

SEQ ID NO: 3628 - DNA, 25 bp, artificial sequence
  antisense probe sequence
gtgtggggcgtggatcgagtgtagc

SEQ ID NO: 3629 - DNA, 25 bp, artificial sequence
  antisense probe sequence
cctttcctactgtgataacgtcaag

SEQ ID NO: 3630 - DNA, 25 bp, artificial sequence
  antisense probe sequence
gaatacatttctgcctgataatcat

SEQ ID NO: 3631 - DNA, 25 bp, artificial sequence
  antisense probe sequence
tgcctgataatcatgctgagttcta

SEQ ID NO: 3632 - DNA, 25 bp, artificial sequence
  antisense probe sequence
tgagttctaataagccctacttcca

SEQ ID NO: 3633 - DNA, 25 bp, artificial sequence
  antisense probe sequence
ctacttccacctaatctgtttacag

SEQ ID NO: 3634 - DNA, 25 bp, artificial sequence
  antisense probe sequence
gtttcagttacttagatggtctcat

SEQ ID NO: 3635 - DNA, 25 bp, artificial sequence
  antisense probe sequence
gatggtctcataaggtttctgatac

SEQ ID NO: 3636 - DNA, 25 bp, artificial sequence
  antisense probe sequence
tcatcctttgtgcctcggttattaa

SEQ ID NO: 3637 - DNA, 25 bp, artificial sequence
  antisense probe sequence
gaaaccgaacaataagtggcaacca

SEQ ID NO: 3638 - DNA, 25 bp, artificial sequence
  antisense probe sequence
ggaaatactggggtgccattttgtt

SEQ ID NO: 3639 - DNA, 25 bp, artificial sequence
  antisense probe sequence
ttgtaatccactgttttggctttca

SEQ ID NO: 3640 - DNA, 25 bp, artificial sequence
  antisense probe sequence
cagatcctccaaaggcacacgttgc

SEQ ID NO: 3641 - DNA, 25 bp, artificial sequence
  antisense probe sequence
tctaccctgcggagatcacgctgac

SEQ ID NO: 3642 - DNA, 25 bp, artificial sequence
  antisense probe sequence
ggaacagacccaggacacagagctt

SEQ ID NO: 3643 - DNA, 25 bp, artificial sequence
  antisense probe sequence
cagagcttgtggagaccaggcctgc

SEQ ID NO: 3644 - DNA, 25 bp, artificial sequence
  antisense probe sequence
aggcctgcaggggatggaaccttcc

SEQ ID NO: 3645 - DNA, 25 bp, artificial sequence
  antisense probe sequence
cagcccctcatcctgagatgggagc

SEQ ID NO: 3646 - DNA, 25 bp, artificial sequence
  antisense probe sequence
tgttgtccttggagctgtggtcact

SEQ ID NO: 3647 - DNA, 25 bp, artificial sequence
  antisense probe sequence
ctgtggtcgctgctgtgatgtggag

SEQ ID NO: 3648 - DNA, 25 bp, artificial sequence
  antisense probe sequence
ctctcaggctgcagtcactgacagt

SEQ ID NO: 3649 - DNA, 25 bp, artificial sequence
  antisense probe sequence
cactgacagtgcccagggctctggg

SEQ ID NO: 3650 - DNA, 25 bp, artificial sequence
  antisense probe sequence
gtgagacagcttccttgtgtgggac

SEQ ID NO: 3651 - DNA, 25 bp, artificial sequence
  antisense probe sequence
agcagcttattgtttctctgaaagt

SEQ ID NO: 3652 - DNA, 25 bp, artificial sequence
  antisense probe sequence
atggcaagttgcatcagaaagcttt

SEQ ID NO: 3653 - DNA, 25 bp, artificial sequence
  antisense probe sequence
gattcccaaacgtggttacattagc

SEQ ID NO: 3654 - DNA, 25 bp, artificial sequence
  antisense probe sequence
aacgtggttacattagccattcatg

SEQ ID NO: 3655 - DNA, 25 bp, artificial sequence
  antisense probe sequence
gccattcatgtatgtcagaagtgca

SEQ ID NO: 3656 - DNA, 25 bp, artificial sequence
  antisense probe sequence
tggggcacttaatggtcaccttgta

SEQ ID NO: 3657 - DNA, 25 bp, artificial sequence
  antisense probe sequence
gtaacagttttgtgtaactcccagt

SEQ ID NO: 3658 - DNA, 25 bp, artificial sequence
  antisense probe sequence
gtaactcccagtgatgctgtacaca

SEQ ID NO: 3659 - DNA, 25 bp, artificial sequence
  antisense probe sequence
gctgtacacatatttgaagggtctt

SEQ ID NO: 3660 - DNA, 25 bp, artificial sequence
  antisense probe sequence
gtgtttttgtgaattgcttggttgt

SEQ ID NO: 3661 - DNA, 25 bp, artificial sequence
  antisense probe sequence
aaattctgagcctgatattgatatg

SEQ ID NO: 3662 - DNA, 25 bp, artificial sequence
  antisense probe sequence
attatataactctttgagcctttat

SEQ ID NO: 3663 - DNA, 25 bp, artificial sequence
  antisense probe sequence
gagcctttattggtaaattctggta

SEQ ID NO: 3664 - DNA, 25 bp, artificial sequence
  antisense probe sequence
aatttgggtgactagaacaacttga

SEQ ID NO: 3665 - DNA, 25 bp, artificial sequence
  antisense probe sequence
gtagcaataagctggactagtgtcc

SEQ ID NO: 3666 - DNA, 25 bp, artificial sequence
  antisense probe sequence
gtgtcctaaaaatggctaactgatg

SEQ ID NO: 3667 - DNA, 25 bp, artificial sequence
  antisense probe sequence
gtgacagtttcttttgtgttcctat

SEQ ID NO: 3668 - DNA, 25 bp, artificial sequence
  antisense probe sequence
gttcctatggaaacattttatactg

SEQ ID NO: 3669 - DNA, 25 bp, artificial sequence
  antisense probe sequence
tgtgtatgttttatatcaaatgcct

SEQ ID NO: 3670 - DNA, 25 bp, artificial sequence
  antisense probe sequence
tcaaatgccttcatgaatctttcat

SEQ ID NO: 3671 - DNA, 25 bp, artificial sequence
  antisense probe sequence
aaacccaatacttttgtccaatgtg

SEQ ID NO: 3672 - DNA, 25 bp, artificial sequence
  antisense probe sequence
acttttgtccaatgtggttggtcaa

SEQ ID NO: 3673 - DNA, 25 bp, artificial sequence
  antisense probe sequence
agatccgagtgcactcgcgaggcaa

SEQ ID NO: 3674 - DNA, 25 bp, artificial sequence
  antisense probe sequence
ccaccggtcacttcatgggcaagaa

SEQ ID NO: 3675 - DNA, 25 bp, artificial sequence
  antisense probe sequence
gggaccagcgactgcagctgagtca

SEQ ID NO: 3676 - DNA, 25 bp, artificial sequence
  antisense probe sequence
gagtcatgatctgctcggaatcctc

SEQ ID NO: 3677 - DNA, 25 bp, artificial sequence
  antisense probe sequence
tgctcggaatcctcctgctaaagaa

SEQ ID NO: 3678 - DNA, 25 bp, artificial sequence
  antisense probe sequence
gcaccccaaatccagtacaggaggc

SEQ ID NO: 3679 - DNA, 25 bp, artificial sequence
  antisense probe sequence
taggggcagacacaacagcgtggct

SEQ ID NO: 3680 - DNA, 25 bp, artificial sequence
  antisense probe sequence
agcgtggcttagattgtgcccaccc

SEQ ID NO: 3681 - DNA, 25 bp, artificial sequence
  antisense probe sequence
gtgcccacccagggaaggtgctgaa

SEQ ID NO: 3682 - DNA, 25 bp, artificial sequence
  antisense probe sequence
tgaatgggaccctgttgatggcccc

SEQ ID NO: 3683 - DNA, 25 bp, artificial sequence
  antisense probe sequence
aatctctgttactccattactgtga

SEQ ID NO: 3684 - DNA, 25 bp, artificial sequence
  antisense probe sequence
ggctgtcgactgggctaagtctgga

SEQ ID NO: 3685 - DNA, 25 bp, artificial sequence
  antisense probe sequence
tcgacgaagccaaactttctgtctt

SEQ ID NO: 3686 - DNA, 25 bp, artificial sequence
  antisense probe sequence
ttctgtcttctcaaccgtagatgct

SEQ ID NO: 3687 - DNA, 25 bp, artificial sequence
  antisense probe sequence
tcctgtcgctccttcagacaaagga

SEQ ID NO: 3688 - DNA, 25 bp, artificial sequence
  antisense probe sequence
aaggaatggaccacttcttgtacgg

SEQ ID NO: 3689 - DNA, 25 bp, artificial sequence
  antisense probe sequence
tcttgtacggcctctcggatgagat

SEQ ID NO: 3690 - DNA, 25 bp, artificial sequence
  antisense probe sequence
ctttgctgtcagccacgacaagctc

SEQ ID NO: 3691 - DNA, 25 bp, artificial sequence
  antisense probe sequence
gcacaggagcccgagacaatacacc

SEQ ID NO: 3692 - DNA, 25 bp, artificial sequence
  antisense probe sequence
tgtcattgagtgtcgccaaagccct

SEQ ID NO: 3693 - DNA, 25 bp, artificial sequence
  antisense probe sequence
gccaaagcccttgactggcgagtca

SEQ ID NO: 3694 - DNA, 25 bp, artificial sequence
  antisense probe sequence
ttttcactttgtactggcaggctcg

SEQ ID NO: 3695 - DNA, 25 bp, artificial sequence
  antisense probe sequence
cagcccctgaagaaaattcacgtga

SEQ ID NO: 3696 - DNA, 25 bp, artificial sequence
  antisense probe sequence
gatgatgatacattccaagtcttca

SEQ ID NO: 3697 - DNA, 25 bp, artificial sequence
  antisense probe sequence
gacaaactttgcaggacttccctta

SEQ ID NO: 3698 - DNA, 25 bp, artificial sequence
  antisense probe sequence
gcaggacttcccttataaagcaaaa

SEQ ID NO: 3699 - DNA, 25 bp, artificial sequence
  antisense probe sequence
gttcagcttccaattagtattcttt

SEQ ID NO: 3700 - DNA, 25 bp, artificial sequence
  antisense probe sequence
tatatttctttcattgggcgctttc

SEQ ID NO: 3701 - DNA, 25 bp, artificial sequence
  antisense probe sequence
ctttcccatctccaactcggaagta

SEQ ID NO: 3702 - DNA, 25 bp, artificial sequence
  antisense probe sequence
gaagtaagcccaagagaacaacata

SEQ ID NO: 3703 - DNA, 25 bp, artificial sequence
  antisense probe sequence
gaatacaccaaaaggaggcgctctt

SEQ ID NO: 3704 - DNA, 25 bp, artificial sequence
  antisense probe sequence
aaatccaaatttctctcaatgttag

SEQ ID NO: 3705 - DNA, 25 bp, artificial sequence
  antisense probe sequence
gatttaattccctcaataacaccaa

SEQ ID NO: 3706 - DNA, 25 bp, artificial sequence
  antisense probe sequence
ttcctgttctcttgtatagctgaaa

SEQ ID NO: 3707 - DNA, 25 bp, artificial sequence
  antisense probe sequence
gttctcttgtatagctgaaattcca

SEQ ID NO: 3708 - DNA, 25 bp, artificial sequence
  antisense probe sequence
gaaattccagtttaggagctcagtt

SEQ ID NO: 3709 - DNA, 25 bp, artificial sequence
  antisense probe sequence
gagaaacagttccattcaactggaa

SEQ ID NO: 3710 - DNA, 25 bp, artificial sequence
  antisense probe sequence
tgaaaaacctgatgcagtgctccat

SEQ ID NO: 3711 - DNA, 25 bp, artificial sequence
  antisense probe sequence
gggacagtttgtaacttgggctgta

SEQ ID NO: 3712 - DNA, 25 bp, artificial sequence
  antisense probe sequence
taactcccatatctcctttaatgac

SEQ ID NO: 3713 - DNA, 25 bp, artificial sequence
  antisense probe sequence
cccatatctcctttaatgacattga

SEQ ID NO: 3714 - DNA, 25 bp, artificial sequence
  antisense probe sequence
attgatgccaagcttttttgccaca

SEQ ID NO: 3715 - DNA, 25 bp, artificial sequence
  antisense probe sequence
tgatgccaagcttttttgccacaaa

SEQ ID NO: 3716 - DNA, 25 bp, artificial sequence
  antisense probe sequence
gggctttgtggaaacagctggtact

SEQ ID NO: 3717 - DNA, 25 bp, artificial sequence
  antisense probe sequence
gatcttaaagccacggagaagcctc

SEQ ID NO: 3718 - DNA, 25 bp, artificial sequence
  antisense probe sequence
tgcccttgtttcttgtggagtcagg

SEQ ID NO: 3719 - DNA, 25 bp, artificial sequence
  antisense probe sequence
atgaggcaaagaggcacctcctcca

SEQ ID NO: 3720 - DNA, 25 bp, artificial sequence
  antisense probe sequence
gaaggtccagctcagtggcacaagt

SEQ ID NO: 3721 - DNA, 25 bp, artificial sequence
  antisense probe sequence
gacgggtataatccctgagacccag

SEQ ID NO: 3722 - DNA, 25 bp, artificial sequence
  antisense probe sequence
gacccagattgtgacttgcaatgga

SEQ ID NO: 3723 - DNA, 25 bp, artificial sequence
  antisense probe sequence
agaaagggcaacttactcttcctgg

SEQ ID NO: 3724 - DNA, 25 bp, artificial sequence
  antisense probe sequence
actcttcctggcatcttattgtatt

SEQ ID NO: 3725 - DNA, 25 bp, artificial sequence
  antisense probe sequence
aatctcttactcaacgaacacatct

SEQ ID NO: 3726 - DNA, 25 bp, artificial sequence
  antisense probe sequence
catcttctgatgatttcccaaaatt

SEQ ID NO: 3727 - DNA, 25 bp, artificial sequence
  antisense probe sequence
attgcccaactctatgtttctttga

SEQ ID NO: 3728 - DNA, 25 bp, artificial sequence
  antisense probe sequence
aatggattgattcctgcctttattc

SEQ ID NO: 3729 - DNA, 25 bp, artificial sequence
  antisense probe sequence
ttttcttcacacatcgaatacccaa

SEQ ID NO: 3730 - DNA, 25 bp, artificial sequence
  antisense probe sequence
tctgcgttcttgtccaaattctgct

SEQ ID NO: 3731 - DNA, 25 bp, artificial sequence
  antisense probe sequence
aattctgcttcatagtagccgtctc

SEQ ID NO: 3732 - DNA, 25 bp, artificial sequence
  antisense probe sequence
tctctgcagtcttttccaactaaat

SEQ ID NO: 3733 - DNA, 25 bp, artificial sequence
  antisense probe sequence
actaatgtaattctcacttttcctt

SEQ ID NO: 3734 - DNA, 25 bp, artificial sequence
  antisense probe sequence
cttttccttttccataatagttcat

SEQ ID NO: 3735 - DNA, 25 bp, artificial sequence
  antisense probe sequence
aagggtatgttcggttgttgtctgt

SEQ ID NO: 3736 - DNA, 25 bp, artificial sequence
  antisense probe sequence
tttgtatctaaaacgcattcccctc

SEQ ID NO: 3737 - DNA, 25 bp, artificial sequence
  antisense probe sequence
tgggttgttcaattatctctatata

SEQ ID NO: 3738 - DNA, 25 bp, artificial sequence
  antisense probe sequence
tatacgggttatacgcaccggaggc

SEQ ID NO: 3739 - DNA, 25 bp, artificial sequence
  antisense probe sequence
gatgtggctctaaatcagccggaca

SEQ ID NO: 3740 - DNA, 25 bp, artificial sequence
  antisense probe sequence
ccggacatgtgcgtctaccgaagag

SEQ ID NO: 3741 - DNA, 25 bp, artificial sequence
  antisense probe sequence
gtgcgtctaccgaagagggaggaag

SEQ ID NO: 3742 - DNA, 25 bp, artificial sequence
  antisense probe sequence
agagagtgccttacaccaaactgca

SEQ ID NO: 3743 - DNA, 25 bp, artificial sequence
  antisense probe sequence
caaactgcagcttaaagaactggag

SEQ ID NO: 3744 - DNA, 25 bp, artificial sequence
  antisense probe sequence
gaactggagaacgagtatgccatta

SEQ ID NO: 3745 - DNA, 25 bp, artificial sequence
  antisense probe sequence
tcggctgctacgaacctatctgaga

SEQ ID NO: 3746 - DNA, 25 bp, artificial sequence
  antisense probe sequence
tgctacgaacctatctgagagacaa

SEQ ID NO: 3747 - DNA, 25 bp, artificial sequence
  antisense probe sequence
gagagacaagtgaccatttggtttc

SEQ ID NO: 3748 - DNA, 25 bp, artificial sequence
  antisense probe sequence
acaagaaaattgtctccaagctcaa

SEQ ID NO: 3749 - DNA, 25 bp, artificial sequence
  antisense probe sequence
gtctccaagctcaaagatactgtct

SEQ ID NO: 3750 - DNA, 25 bp, artificial sequence
  antisense probe sequence
ttgccttgtaattcgacagctctac

SEQ ID NO: 3751 - DNA, 25 bp, artificial sequence
  antisense probe sequence
acttttagtgaccacgggctacatc

SEQ ID NO: 3752 - DNA, 25 bp, artificial sequence
  antisense probe sequence
gggctacatcatatgctttgttcct

SEQ ID NO: 3753 - DNA, 25 bp, artificial sequence
  antisense probe sequence
ataccctcagccagacagaagtcat

SEQ ID NO: 3754 - DNA, 25 bp, artificial sequence
  antisense probe sequence
gaagtcataactgattgctcaacca

SEQ ID NO: 3755 - DNA, 25 bp, artificial sequence
  antisense probe sequence
tgctcaaccaggatttcactcttca

SEQ ID NO: 3756 - DNA, 25 bp, artificial sequence
  antisense probe sequence
aagccaaagaggctacactgctcct

SEQ ID NO: 3757 - DNA, 25 bp, artificial sequence
  antisense probe sequence
tgctttgatcctatcctgtactatc

SEQ ID NO: 3758 - DNA, 25 bp, artificial sequence
  antisense probe sequence
aaagcattccgctcaaaggtcactg

SEQ ID NO: 3759 - DNA, 25 bp, artificial sequence
  antisense probe sequence
tcactgagacttttgcctcacctaa

SEQ ID NO: 3760 - DNA, 25 bp, artificial sequence
  antisense probe sequence
tgctaccaattctggccttactgga

SEQ ID NO: 3761 - DNA, 25 bp, artificial sequence
  antisense probe sequence
ttgagttctccttttaagtaccaat

SEQ ID NO: 3762 - DNA, 25 bp, artificial sequence
  antisense probe sequence
ggtgtgtcattgccttgaaatgctt

SEQ ID NO: 3763 - DNA, 25 bp, artificial sequence
  antisense probe sequence
gaaatgcttgcttagggcttctttt

SEQ ID NO: 3764 - DNA, 25 bp, artificial sequence
  antisense probe sequence
tagggcttcttttatgttatcttaa

SEQ ID NO: 3765 - DNA, 25 bp, artificial sequence
  antisense probe sequence
aagtgctggtgaattttccattttt

SEQ ID NO: 3766 - DNA, 25 bp, artificial sequence
  antisense probe sequence
ttccattttttacatccatttcaca

SEQ ID NO: 3767 - DNA, 25 bp, artificial sequence
  antisense probe sequence
gaaaggtaacaatcttcattctaca

SEQ ID NO: 3768 - DNA, 25 bp, artificial sequence
  antisense probe sequence
aatgcgtgcgtttcagtgtttaaga

SEQ ID NO: 3769 - DNA, 25 bp, artificial sequence
  antisense probe sequence
caagcagtttgtgtggtgtttctat

SEQ ID NO: 3770 - DNA, 25 bp, artificial sequence
  antisense probe sequence
aaatctgctggccagctatgtcctc

SEQ ID NO: 3771 - DNA, 25 bp, artificial sequence
  antisense probe sequence
taggaaatgacagacccaaccacca

SEQ ID NO: 3772 - DNA, 25 bp, artificial sequence
  antisense probe sequence
agggtttcatccaggatcgagcagg

SEQ ID NO: 3773 - DNA, 25 bp, artificial sequence
  antisense probe sequence
tttcatccaggatcgagcagggcga

SEQ ID NO: 3774 - DNA, 25 bp, artificial sequence
  antisense probe sequence
ggatcgagcagggcgaatggggggg

SEQ ID NO: 3775 - DNA, 25 bp, artificial sequence
  antisense probe sequence
gcagggcgaatggggggggaggcac

SEQ ID NO: 3776 - DNA, 25 bp, artificial sequence
  antisense probe sequence
cctcaggatgcgtccaccaagaagc

SEQ ID NO: 3777 - DNA, 25 bp, artificial sequence
  antisense probe sequence
tgcgtccaccaagaagctgagcgag

SEQ ID NO: 3778 - DNA, 25 bp, artificial sequence
  antisense probe sequence
gctgagcgagtgtctcaagcgcatc

SEQ ID NO: 3779 - DNA, 25 bp, artificial sequence
  antisense probe sequence
gtctcaagcgcatcggggacgaact

SEQ ID NO: 3780 - DNA, 25 bp, artificial sequence
  antisense probe sequence
gcgcatcggggacgaactggacagt

SEQ ID NO: 3781 - DNA, 25 bp, artificial sequence
  antisense probe sequence
gaactggacagtaacatggagctgc

SEQ ID NO: 3782 - DNA, 25 bp, artificial sequence
  antisense probe sequence
cagtaacatggagctgcagaggatg

SEQ ID NO: 3783 - DNA, 25 bp, artificial sequence
  antisense probe sequence
ctggcctctactacgtggacagtga

SEQ ID NO: 3784 - DNA, 25 bp, artificial sequence
  antisense probe sequence
taggttctggctctgtgtatgcata

SEQ ID NO: 3785 - DNA, 25 bp, artificial sequence
  antisense probe sequence
tggatcggggctattcctatgacct

SEQ ID NO: 3786 - DNA, 25 bp, artificial sequence
  antisense probe sequence
ggagcaggcctatgatctggcccgt

SEQ ID NO: 3787 - DNA, 25 bp, artificial sequence
  antisense probe sequence
aggaggtgcagtcaacctctaccac

SEQ ID NO: 3788 - DNA, 25 bp, artificial sequence
  antisense probe sequence
ggaggatggctggatccgagtctcc

SEQ ID NO: 3789 - DNA, 25 bp, artificial sequence
  antisense probe sequence
tgagaagtatagtggctctaccccc

SEQ ID NO: 3790 - DNA, 25 bp, artificial sequence
  antisense probe sequence
gtgtttcttggggtgactgtcattg

SEQ ID NO: 3791 - DNA, 25 bp, artificial sequence
  antisense probe sequence
taatacggacacagtgacccatcct

SEQ ID NO: 3792 - DNA, 25 bp, artificial sequence
  antisense probe sequence
gaagggccttcaattgtatcagtac

SEQ ID NO: 3793 - DNA, 25 bp, artificial sequence
  antisense probe sequence
taagctctggcacattgacctctat

SEQ ID NO: 3794 - DNA, 25 bp, artificial sequence
  antisense probe sequence
gaagtaagcctcatcatcagagcct

SEQ ID NO: 3795 - DNA, 25 bp, artificial sequence
  antisense probe sequence
atcagagcctttcctcaaaactgga

SEQ ID NO: 3796 - DNA, 25 bp, artificial sequence
  antisense probe sequence
ggagtcccaaatgtcatcaggtttt

SEQ ID NO: 3797 - DNA, 25 bp, artificial sequence
  antisense probe sequence
acccctctgcttttaactctagaat

SEQ ID NO: 3798 - DNA, 25 bp, artificial sequence
  antisense probe sequence
cctctagagccttcagccttaatgg

SEQ ID NO: 3799 - DNA, 25 bp, artificial sequence
  antisense probe sequence
aatcaagccactcggcaggcatgga

SEQ ID NO: 3800 - DNA, 25 bp, artificial sequence
  antisense probe sequence
taagcatccttagggttctgcctct

SEQ ID NO: 3801 - DNA, 25 bp, artificial sequence
  antisense probe sequence
ctccaggcattagccctcacattag

SEQ ID NO: 3802 - DNA, 25 bp, artificial sequence
  antisense probe sequence
tttggaggcaatcctaccttgcttt

SEQ ID NO: 3803 - DNA, 25 bp, artificial sequence
  antisense probe sequence
tgtgccaatcaatagcacccctact

SEQ ID NO: 3804 - DNA, 25 bp, artificial sequence
  antisense probe sequence
acacacctagccagctgtcaagggc

SEQ ID NO: 3805 - DNA, 25 bp, artificial sequence
  antisense probe sequence
gacctggcagcgggatggcgaggac

SEQ ID NO: 3806 - DNA, 25 bp, artificial sequence
  antisense probe sequence
ccccatcgtgggcattgttgctggc

SEQ ID NO: 3807 - DNA, 25 bp, artificial sequence
  antisense probe sequence
ggctgtcctagcagttgtggtcatc

SEQ ID NO: 3808 - DNA, 25 bp, artificial sequence
  antisense probe sequence
ctgtggtcgctgctgtgatgtgtag

SEQ ID NO: 3809 - DNA, 25 bp, artificial sequence
  antisense probe sequence
gcgacagtgcccagggctctgatgt

SEQ ID NO: 3810 - DNA, 25 bp, artificial sequence
  antisense probe sequence
gagacagctgtcttgtgagggactg

SEQ ID NO: 3811 - DNA, 25 bp, artificial sequence
  antisense probe sequence
gagatgcaggatttcttcacgcctc

SEQ ID NO: 3812 - DNA, 25 bp, artificial sequence
  antisense probe sequence
gtgacttcaagagcctctggcatct

SEQ ID NO: 3813 - DNA, 25 bp, artificial sequence
  antisense probe sequence
gcatctctttctgcaaaggcacctg

SEQ ID NO: 3814 - DNA, 25 bp, artificial sequence
  antisense probe sequence
aaggcacctgaatgtgtctgcgtcc

SEQ ID NO: 3815 - DNA, 25 bp, artificial sequence
  antisense probe sequence
gtctgcgtccctgttagcataatgt

SEQ ID NO: 3816 - DNA, 25 bp, artificial sequence
  antisense probe sequence
ccgcctggcttgggtggcaagagaa

SEQ ID NO: 3817 - DNA, 25 bp, artificial sequence
  antisense probe sequence
agaaaaggaggacagcgcccaggag

SEQ ID NO: 3818 - DNA, 25 bp, artificial sequence
  antisense probe sequence
tttctaactgtcggacccgtctgta

SEQ ID NO: 3819 - DNA, 25 bp, artificial sequence
  antisense probe sequence
gacccgtctgtaaaccaaggactat

SEQ ID NO: 3820 - DNA, 25 bp, artificial sequence
  antisense probe sequence
gttctaggcaattatacggggactc

SEQ ID NO: 3821 - DNA, 25 bp, artificial sequence
  antisense probe sequence
gccgctgccttcattgagtttaaag

SEQ ID NO: 3822 - DNA, 25 bp, artificial sequence
  antisense probe sequence
gattgcccttccgtcaagaaagtat

SEQ ID NO: 3823 - DNA, 25 bp, artificial sequence
  antisense probe sequence
ttttcccacaaccgagactttggag

SEQ ID NO: 3824 - DNA, 25 bp, artificial sequence
  antisense probe sequence
gttggccatatttcagagacttaga

SEQ ID NO: 3825 - DNA, 25 bp, artificial sequence
  antisense probe sequence
gattgacgtatatgtttctgcatta

SEQ ID NO: 3826 - DNA, 25 bp, artificial sequence
  antisense probe sequence
gtatcagagcgggagtgcgggggag

SEQ ID NO: 3827 - DNA, 25 bp, artificial sequence
  antisense probe sequence
gaattgcaaaactgacatcccattt

SEQ ID NO: 3828 - DNA, 25 bp, artificial sequence
  antisense probe sequence
actgacatcccatttcacagcaata

SEQ ID NO: 3829 - DNA, 25 bp, artificial sequence
  antisense probe sequence
cacagcaatagtgacctttatttaa

SEQ ID NO: 3830 - DNA, 25 bp, artificial sequence
  antisense probe sequence
gttgtgttatagtttatgcttctta

SEQ ID NO: 3831 - DNA, 25 bp, artificial sequence
  antisense probe sequence
tttcaacctaaacagccaatttcta

SEQ ID NO: 3832 - DNA, 25 bp, artificial sequence
  antisense probe sequence
acagccaatttctaagcagacagga

SEQ ID NO: 3833 - DNA, 25 bp, artificial sequence
  antisense probe sequence
tattttctagattatccctgtgaat

SEQ ID NO: 3834 - DNA, 25 bp, artificial sequence
  antisense probe sequence
aaatcttaggtttgcttatgcccag

SEQ ID NO: 3835 - DNA, 25 bp, artificial sequence
  antisense probe sequence
gctgtttctcacatctatagtgaca

SEQ ID NO: 3836 - DNA, 25 bp, artificial sequence
  antisense probe sequence
ataggaggggttaaggttcatgaga

SEQ ID NO: 3837 - DNA, 25 bp, artificial sequence
  antisense probe sequence
ggtctgagatgggtgctgcaaagat

SEQ ID NO: 3838 - DNA, 25 bp, artificial sequence
  antisense probe sequence
agagagacacagctgcagaggccac

SEQ ID NO: 3839 - DNA, 25 bp, artificial sequence
  antisense probe sequence
acctggattgcgcctaatgtgtttg

SEQ ID NO: 3840 - DNA, 25 bp, artificial sequence
  antisense probe sequence
tgattgaatctacttgcacactctc

SEQ ID NO: 3841 - DNA, 25 bp, artificial sequence
  antisense probe sequence
gcacactctcccattatatttattg

SEQ ID NO: 3842 - DNA, 25 bp, artificial sequence
  antisense probe sequence
aacccaagttagttcaatcctgatt

SEQ ID NO: 3843 - DNA, 25 bp, artificial sequence
  antisense probe sequence
gaaggtttgcagatattctctagtc

SEQ ID NO: 3844 - DNA, 25 bp, artificial sequence
  antisense probe sequence
gacatatcacatgtcagccactgtg

SEQ ID NO: 3845 - DNA, 25 bp, artificial sequence
  antisense probe sequence
atggccagtaagatcaatgtgacgg

SEQ ID NO: 3846 - DNA, 25 bp, artificial sequence
  antisense probe sequence
tgtgacggcagggaaatgtatgtgt

SEQ ID NO: 3847 - DNA, 25 bp, artificial sequence
  antisense probe sequence
cagtgtgtggtcaacatttctcatg

SEQ ID NO: 3848 - DNA, 25 bp, artificial sequence
  antisense probe sequence
atgttaattatgcagtgtttccctc

SEQ ID NO: 3849 - DNA, 25 bp, artificial sequence
  antisense probe sequence
tactggcacaagtttatcttcttcc

SEQ ID NO: 3850 - DNA, 25 bp, artificial sequence
  antisense probe sequence
atcttcttccagatttcctttcaga

SEQ ID NO: 3851 - DNA, 25 bp, artificial sequence
  antisense probe sequence
tgcttttccatttcgtcatgaccta

SEQ ID NO: 3852 - DNA, 25 bp, artificial sequence
  antisense probe sequence
ctgtctcttcgtactcggttattaa

SEQ ID NO: 3853 - DNA, 25 bp, artificial sequence
  antisense probe sequence
ccttgcttgttcctgcattagggga

SEQ ID NO: 3854 - DNA, 25 bp, artificial sequence
  antisense probe sequence
ggaaagttggggacatgctgctaca

SEQ ID NO: 3855 - DNA, 25 bp, artificial sequence
  antisense probe sequence
gctgctacaatacggctaatctttc

SEQ ID NO: 3856 - DNA, 25 bp, artificial sequence
  antisense probe sequence
gcaacattgtacaagtcacccagcc

SEQ ID NO: 3857 - DNA, 25 bp, artificial sequence
  antisense probe sequence
gtcacccagccagaaggaatgcaca

SEQ ID NO: 3858 - DNA, 25 bp, artificial sequence
  antisense probe sequence
gatactgttgttacttctgcatgtt

SEQ ID NO: 3859 - DNA, 25 bp, artificial sequence
  antisense probe sequence
gagcacccggaaacggtcacgagac

SEQ ID NO: 3860 - DNA, 25 bp, artificial sequence
  antisense probe sequence
ggcataggaacagttttctcttcat

SEQ ID NO: 3861 - DNA, 25 bp, artificial sequence
  antisense probe sequence
aattcagtatttgtcattatgcagt

SEQ ID NO: 3862 - DNA, 25 bp, artificial sequence
  antisense probe sequence
atacctacataagtctattccatta

SEQ ID NO: 3863 - DNA, 25 bp, artificial sequence
  antisense probe sequence
ttttgcgcttggcatatttattcct

SEQ ID NO: 3864 - DNA, 25 bp, artificial sequence
  antisense probe sequence
agctgggtataccattatttcaagt

SEQ ID NO: 3865 - DNA, 25 bp, artificial sequence
  antisense probe sequence
gaacacattttctatagcccttaat

SEQ ID NO: 3866 - DNA, 25 bp, artificial sequence
  antisense probe sequence
tatagcccttaatttagttgtgtta

SEQ ID NO: 3867 - DNA, 25 bp, artificial sequence
  antisense probe sequence
ggtgatgtatcaacagctttttttt

SEQ ID NO: 3868 - DNA, 25 bp, artificial sequence
  antisense probe sequence
gtatgaattgagctttttgcccaca

SEQ ID NO: 3869 - DNA, 25 bp, artificial sequence
  antisense probe sequence
ttttgcccacagattcttgatttgt

SEQ ID NO: 3870 - DNA, 25 bp, artificial sequence
  antisense probe sequence
cttgatttgtagttgtttggcagga

SEQ ID NO: 3871 - DNA, 25 bp, artificial sequence
  antisense probe sequence
gattgagtcatcgacattcaggatt

SEQ ID NO: 3872 - DNA, 25 bp, artificial sequence
  antisense probe sequence
aggatttaagtctgaggtagtcaac

SEQ ID NO: 3873 - DNA, 25 bp, artificial sequence
  antisense probe sequence
aaaaatggcttatctgaaatcagta

SEQ ID NO: 3874 - DNA, 25 bp, artificial sequence
  antisense probe sequence
atgcttctggaattgagttctcctt

SEQ ID NO: 3875 - DNA, 25 bp, artificial sequence
  antisense probe sequence
gagttctccttttaagtaccaatga

SEQ ID NO: 3876 - DNA, 25 bp, artificial sequence
  antisense probe sequence
tgtaatggtgtgtcattgccttgaa

SEQ ID NO: 3877 - DNA, 25 bp, artificial sequence
  antisense probe sequence
gtgtcattgccttgaaatgcttgct

SEQ ID NO: 3878 - DNA, 25 bp, artificial sequence
  antisense probe sequence
tgaaatgcttgcttagggcttcttt

SEQ ID NO: 3879 - DNA, 25 bp, artificial sequence
  antisense probe sequence
aaaagtctagattggtcttgatatt

SEQ ID NO: 3880 - DNA, 25 bp, artificial sequence
  antisense probe sequence
caatcttcattctacagatgaactc

SEQ ID NO: 3881 - DNA, 25 bp, artificial sequence
  antisense probe sequence
gcgtgcgtttcagtgtttaagaagg

SEQ ID NO: 3882 - DNA, 25 bp, artificial sequence
  antisense probe sequence
gaaagtgtcctatttgtaggagtac

SEQ ID NO: 3883 - DNA, 25 bp, artificial sequence
  antisense probe sequence
ggagtacaatcaagggtacagttcg

SEQ ID NO: 3884 - DNA, 25 bp, artificial sequence
  antisense probe sequence
gtacagttcgtacatttctttcatg

SEQ ID NO: 3885 - DNA, 25 bp, artificial sequence
  antisense probe sequence
ataggcttttgttcttatgaacgaa

SEQ ID NO: 3886 - DNA, 25 bp, artificial sequence
  antisense probe sequence
aagaggtagcactacaaacacaata

SEQ ID NO: 3887 - DNA, 25 bp, artificial sequence
  antisense probe sequence
aatattttggcattgtactaatacc

SEQ ID NO: 3888 - DNA, 25 bp, artificial sequence
  antisense probe sequence
ggcagcatactgagaccctgccttt

SEQ ID NO: 3889 - DNA, 25 bp, artificial sequence
  antisense probe sequence
aaaacaccagggacacatttctctg

SEQ ID NO: 3890 - DNA, 25 bp, artificial sequence
  antisense probe sequence
cagggacacatttctctgtcttttt

SEQ ID NO: 3891 - DNA, 25 bp, artificial sequence
  antisense probe sequence
tttgatcagtgtcctatacatcgaa

SEQ ID NO: 3892 - DNA, 25 bp, artificial sequence
  antisense probe sequence
gtcctatacatcgaaggtgtgcata

SEQ ID NO: 3893 - DNA, 25 bp, artificial sequence
  antisense probe sequence
caccaccctgtctttgactatgagg

SEQ ID NO: 3894 - DNA, 25 bp, artificial sequence
  antisense probe sequence
gactatgaggccaccctgaggtgct

SEQ ID NO: 3895 - DNA, 25 bp, artificial sequence
  antisense probe sequence
taccctgcggagatcatactgacct

SEQ ID NO: 3896 - DNA, 25 bp, artificial sequence
  antisense probe sequence
gacgtggagctcgtggagaccaggc

SEQ ID NO: 3897 - DNA, 25 bp, artificial sequence
  antisense probe sequence
gagatacacgtgccatgtgcagcat

SEQ ID NO: 3898 - DNA, 25 bp, artificial sequence
  antisense probe sequence
gagatggaagcagtcttccctgccc

SEQ ID NO: 3899 - DNA, 25 bp, artificial sequence
  antisense probe sequence
ttgtccttgcagctgtagtcactgg

SEQ ID NO: 3900 - DNA, 25 bp, artificial sequence
  antisense probe sequence
agctactctcaggctgcaagcagtg

SEQ ID NO: 3901 - DNA, 25 bp, artificial sequence
  antisense probe sequence
cagtgcccagggctctaatgtgtct

SEQ ID NO: 3902 - DNA, 25 bp, artificial sequence
  antisense probe sequence
gtgtctctcacggcttgtaaattgt

SEQ ID NO: 3903 - DNA, 25 bp, artificial sequence
  antisense probe sequence
acagctgccctgtgtgggactgagt

SEQ ID NO: 3904 - DNA, 25 bp, artificial sequence
  antisense probe sequence
acacagatccaggtagtctctgcta

SEQ ID NO: 3905 - DNA, 25 bp, artificial sequence
  antisense probe sequence
gtctctgctagtaatgagccccttg

SEQ ID NO: 3906 - DNA, 25 bp, artificial sequence
  antisense probe sequence
agcacagacagcaggcatagccgca

SEQ ID NO: 3907 - DNA, 25 bp, artificial sequence
  antisense probe sequence
agccgcagcggcgagagctaaacaa

SEQ ID NO: 3908 - DNA, 25 bp, artificial sequence
  antisense probe sequence
caaaagggcgtgatccacatccgag

SEQ ID NO: 3909 - DNA, 25 bp, artificial sequence
  antisense probe sequence
ttgtctgccatgcacggactgatca

SEQ ID NO: 3910 - DNA, 25 bp, artificial sequence
  antisense probe sequence
ggactgatcatgggcggcctggaag

SEQ ID NO: 3911 - DNA, 25 bp, artificial sequence
  antisense probe sequence
ctcagctccagtgggaccttgtaaa

SEQ ID NO: 3912 - DNA, 25 bp, artificial sequence
  antisense probe sequence
ggaccttgtaaaatgctccctgtca

SEQ ID NO: 3913 - DNA, 25 bp, artificial sequence
  antisense probe sequence
tccctgtcagagctctccagaatat

SEQ ID NO: 3914 - DNA, 25 bp, artificial sequence
  antisense probe sequence
ggtgtgccccagaagtaagctttgc

SEQ ID NO: 3915 - DNA, 25 bp, artificial sequence
  antisense probe sequence
ggtgctgccctgtgtacatataaat

SEQ ID NO: 3916 - DNA, 25 bp, artificial sequence
  antisense probe sequence
ggtgttggggaaaccttcatctgaa

SEQ ID NO: 3917 - DNA, 25 bp, artificial sequence
  antisense probe sequence
agactctgagctgctcaccggagtc

SEQ ID NO: 3918 - DNA, 25 bp, artificial sequence
  antisense probe sequence
gctgctcaccggagtcattgggaag

SEQ ID NO: 3919 - DNA, 25 bp, artificial sequence
  antisense probe sequence
ctagagtctcagaaactcccctggg

SEQ ID NO: 3920 - DNA, 25 bp, artificial sequence
  antisense probe sequence
ggaggaattcagctcagcttcttcc

SEQ ID NO: 3921 - DNA, 25 bp, artificial sequence
  antisense probe sequence
acaagagtttgttctgttctggggg

SEQ ID NO: 3922 - DNA, 25 bp, artificial sequence
  antisense probe sequence
tctgggggacagagaaggcgcttcc

SEQ ID NO: 3923 - DNA, 25 bp, artificial sequence
  antisense probe sequence
gcttcccaacttcatactggcagga

SEQ ID NO: 3924 - DNA, 25 bp, artificial sequence
  antisense probe sequence
ggtgaggaggttcactgagctcccc

SEQ ID NO: 3925 - DNA, 25 bp, artificial sequence
  antisense probe sequence
cccactgcggggagacagaagcctg

SEQ ID NO: 3926 - DNA, 25 bp, artificial sequence
  antisense probe sequence
ccagcacgggcttcagtagtggacc

SEQ ID NO: 3927 - DNA, 25 bp, artificial sequence
  antisense probe sequence
ggacccagttctattgttggcttca

SEQ ID NO: 3928 - DNA, 25 bp, artificial sequence
  antisense probe sequence
gcttcagcggtggaccaagcactgg

SEQ ID NO: 3929 - DNA, 25 bp, artificial sequence
  antisense probe sequence
ccaagcactggtgttggcttctgca

SEQ ID NO: 3930 - DNA, 25 bp, artificial sequence
  antisense probe sequence
agtggaccaagcaccagtggcttca

SEQ ID NO: 3931 - DNA, 25 bp, artificial sequence
  antisense probe sequence
gcttcagcggtggaccgagcacagg

SEQ ID NO: 3932 - DNA, 25 bp, artificial sequence
  antisense probe sequence
ccgagcacaggagctggcttcggcg

SEQ ID NO: 3933 - DNA, 25 bp, artificial sequence
  antisense probe sequence
cttcggcggtggaccaaacactggt

SEQ ID NO: 3934 - DNA, 25 bp, artificial sequence
  antisense probe sequence
accgagcaccagtgctggctttggc

SEQ ID NO: 3935 - DNA, 25 bp, artificial sequence
  antisense probe sequence
tgctggctttggcagtggagccgcc

SEQ ID NO: 3936 - DNA, 25 bp, artificial sequence
  antisense probe sequence
gtggcttctcgtatggctagtgagg

SEQ ID NO: 3937 - DNA, 25 bp, artificial sequence
  antisense probe sequence
tggagtgtgttcctgaagagcagcc

SEQ ID NO: 3938 - DNA, 25 bp, artificial sequence
  antisense probe sequence
gaggcaggcataggcagggaaccga

SEQ ID NO: 3939 - DNA, 25 bp, artificial sequence
  antisense probe sequence
gggaaccgagcagcaggtcagagca

SEQ ID NO: 3940 - DNA, 25 bp, artificial sequence
  antisense probe sequence
aggcgagctgacattctgcagcctg

SEQ ID NO: 3941 - DNA, 25 bp, artificial sequence
  antisense probe sequence
gcctggacggccatggcaggaagct

SEQ ID NO: 3942 - DNA, 25 bp, artificial sequence
  antisense probe sequence
aagcctcctagggttctgagcagaa

SEQ ID NO: 3943 - DNA, 25 bp, artificial sequence
  antisense probe sequence
ggggcatgagctgattcacattctg

SEQ ID NO: 3944 - DNA, 25 bp, artificial sequence
  antisense probe sequence
acattctgaaggacctctctagctg

SEQ ID NO: 3945 - DNA, 25 bp, artificial sequence
  antisense probe sequence
aaagcagagagaccagtgcagggct

SEQ ID NO: 3946 - DNA, 25 bp, artificial sequence
  antisense probe sequence
gttgcaggcgagagactggggtgct

SEQ ID NO: 3947 - DNA, 25 bp, artificial sequence
  antisense probe sequence
tctcccaagagacaaaggccattgc

SEQ ID NO: 3948 - DNA, 25 bp, artificial sequence
  antisense probe sequence
ggtggccgagagtaaatgtggggac

SEQ ID NO: 3949 - DNA, 25 bp, artificial sequence
  antisense probe sequence
gtaaatgtggggacctagaggagga

SEQ ID NO: 3950 - DNA, 25 bp, artificial sequence
  antisense probe sequence
tggaggcccaggcggacaagtattc

SEQ ID NO: 3951 - DNA, 25 bp, artificial sequence
  antisense probe sequence
caggcggacaagtattccaccaaag

SEQ ID NO: 3952 - DNA, 25 bp, artificial sequence
  antisense probe sequence
gatgaagtctatgcccagaagatga

SEQ ID NO: 3953 - DNA, 25 bp, artificial sequence
  antisense probe sequence
aggaactggacaacgcactcaatga

SEQ ID NO: 3954 - DNA, 25 bp, artificial sequence
  antisense probe sequence
gacaacgcactcaatgacatcacct

SEQ ID NO: 3955 - DNA, 25 bp, artificial sequence
  antisense probe sequence
tcctttccattctctctatggggag

SEQ ID NO: 3956 - DNA, 25 bp, artificial sequence
  antisense probe sequence
gaggagcagaaattgccaacattgc

SEQ ID NO: 3957 - DNA, 25 bp, artificial sequence
  antisense probe sequence
ttgccaacattgcacagccaggctg

SEQ ID NO: 3958 - DNA, 25 bp, artificial sequence
  antisense probe sequence
ctgggagcagcctagggagagcccc

SEQ ID NO: 3959 - DNA, 25 bp, artificial sequence
  antisense probe sequence
accaatgaggttcctgaggtcacag

SEQ ID NO: 3960 - DNA, 25 bp, artificial sequence
  antisense probe sequence
atgaggttcctgaggtcacagtgtt

SEQ ID NO: 3961 - DNA, 25 bp, artificial sequence
  antisense probe sequence
aggttcctgaggtcacagtgttttc

SEQ ID NO: 3962 - DNA, 25 bp, artificial sequence
  antisense probe sequence
tcctgaggtcacagtgttttccaag

SEQ ID NO: 3963 - DNA, 25 bp, artificial sequence
  antisense probe sequence
gtcttgtggacaacatctttcctcc

SEQ ID NO: 3964 - DNA, 25 bp, artificial sequence
  antisense probe sequence
ctctccaagagtgatcattccttct

SEQ ID NO: 3965 - DNA, 25 bp, artificial sequence
  antisense probe sequence
ccaagagtgatcattccttcttcaa

SEQ ID NO: 3966 - DNA, 25 bp, artificial sequence
  antisense probe sequence
agagtgatcattccttcttcaagat

SEQ ID NO: 3967 - DNA, 25 bp, artificial sequence
  antisense probe sequence
agtgatcattccttcttcaagatca

SEQ ID NO: 3968 - DNA, 25 bp, artificial sequence
  antisense probe sequence
gatgagatttatgactgcaaggtgg

SEQ ID NO: 3969 - DNA, 25 bp, artificial sequence
  antisense probe sequence
cctcttctgaaacactgggagcctg

SEQ ID NO: 3970 - DNA, 25 bp, artificial sequence
  antisense probe sequence
gaggaaaatgaagctcgggctggtt

SEQ ID NO: 3971 - DNA, 25 bp, artificial sequence
  antisense probe sequence
gaagctcgggctggttaactgactt

SEQ ID NO: 3972 - DNA, 25 bp, artificial sequence
  antisense probe sequence
gctcgggctggttaactgacttgct

SEQ ID NO: 3973 - DNA, 25 bp, artificial sequence
  antisense probe sequence
cgggctggttaactgacttgctcag

SEQ ID NO: 3974 - DNA, 25 bp, artificial sequence
  antisense probe sequence
gctggttaactgacttgctcagcgt

SEQ ID NO: 3975 - DNA, 25 bp, artificial sequence
  antisense probe sequence
cgctgtgtctagcagcctctaggat

SEQ ID NO: 3976 - DNA, 25 bp, artificial sequence
  antisense probe sequence
tgtctagcagcctctaggatcttgt

SEQ ID NO: 3977 - DNA, 25 bp, artificial sequence
  antisense probe sequence
cctgatttctgtatacatgtagctt

SEQ ID NO: 3978 - DNA, 25 bp, artificial sequence
  antisense probe sequence
tgtatacatgtagctttgccagata

SEQ ID NO: 3979 - DNA, 25 bp, artificial sequence
  antisense probe sequence
agctttgccagatatgtacttagta

SEQ ID NO: 3980 - DNA, 25 bp, artificial sequence
  antisense probe sequence
tattaataaaatccatttactgtgt

SEQ ID NO: 3981 - DNA, 25 bp, artificial sequence
  antisense probe sequence
tacatttttccacgagctggtgcag

SEQ ID NO: 3982 - DNA, 25 bp, artificial sequence
  antisense probe sequence
gacagctctgccatcaggcagctgt

SEQ ID NO: 3983 - DNA, 25 bp, artificial sequence
  antisense probe sequence
acagcccttgtcagatattatctcc

SEQ ID NO: 3984 - DNA, 25 bp, artificial sequence
  antisense probe sequence
tctccaggtgtgtcagagctccgga

SEQ ID NO: 3985 - DNA, 25 bp, artificial sequence
  antisense probe sequence
tgaagctgtctggttctcatctgac

SEQ ID NO: 3986 - DNA, 25 bp, artificial sequence
  antisense probe sequence
ccacagccatggccagagttcttcg

SEQ ID NO: 3987 - DNA, 25 bp, artificial sequence
  antisense probe sequence
cctaacctcatctttgccatagaac

SEQ ID NO: 3988 - DNA, 25 bp, artificial sequence
  antisense probe sequence
gaaaaatttctcatccacctttcta

SEQ ID NO: 3989 - DNA, 25 bp, artificial sequence
  antisense probe sequence
tgcagcacatgaagctcagcacctc

SEQ ID NO: 3990 - DNA, 25 bp, artificial sequence
  antisense probe sequence
gcacctcacgagacttcaagatcaa

SEQ ID NO: 3991 - DNA, 25 bp, artificial sequence
  antisense probe sequence
gagggcactgcatcagagcatgggg

SEQ ID NO: 3992 - DNA, 25 bp, artificial sequence
  antisense probe sequence
gggaacactgctctcagacattaca

SEQ ID NO: 3993 - DNA, 25 bp, artificial sequence
  antisense probe sequence
gactggacctgggaaaacgcatcct

SEQ ID NO: 3994 - DNA, 25 bp, artificial sequence
  antisense probe sequence
cgcatcctggacccacgaggaatat

SEQ ID NO: 3995 - DNA, 25 bp, artificial sequence
  antisense probe sequence
gaatctaccgtgcaagttcattatc

SEQ ID NO: 3996 - DNA, 25 bp, artificial sequence
  antisense probe sequence
gtgtggagctggatccagccaccgt

SEQ ID NO: 3997 - DNA, 25 bp, artificial sequence
  antisense probe sequence
agactggaaggctgtctggggctgc

SEQ ID NO: 3998 - DNA, 25 bp, artificial sequence
  antisense probe sequence
tgccgacacacaagctctgttgagg

SEQ ID NO: 3999 - DNA, 25 bp, artificial sequence
  antisense probe sequence
ggaatgaccaggtctatcagcccct

SEQ ID NO: 4000 - DNA, 25 bp, artificial sequence
  antisense probe sequence
agcccctccgagatcgagatgatgc

SEQ ID NO: 4001 - DNA, 25 bp, artificial sequence
  antisense probe sequence
tgctcagtacagccaccttggagga

SEQ ID NO: 4002 - DNA, 25 bp, artificial sequence
  antisense probe sequence
gaagcagccattaccaactgtacct

SEQ ID NO: 4003 - DNA, 25 bp, artificial sequence
  antisense probe sequence
cgaagccggcggcgtgaacaatcct

SEQ ID NO: 4004 - DNA, 25 bp, artificial sequence
  antisense probe sequence
caggaactcacacctggttcagcat

SEQ ID NO: 4005 - DNA, 25 bp, artificial sequence
  antisense probe sequence
gcaggcggagcaaaggcagggcagc

SEQ ID NO: 4006 - DNA, 25 bp, artificial sequence
  antisense probe sequence
ggaagagccttctgtgggtgcttcc

SEQ ID NO: 4007 - DNA, 25 bp, artificial sequence
  antisense probe sequence
tcatgggtgacttctgactttctaa

SEQ ID NO: 4008 - DNA, 25 bp, artificial sequence
  antisense probe sequence
cttcccaagcacccgaggttggttg

SEQ ID NO: 4009 - DNA, 25 bp, artificial sequence
  antisense probe sequence
ggttggtcccaaatctatcaaactc

SEQ ID NO: 4010 - DNA, 25 bp, artificial sequence
  antisense probe sequence
gccctctttagcgacatattttgtg

SEQ ID NO: 4011 - DNA, 25 bp, artificial sequence
  antisense probe sequence
ttgtgacattccttccattacacca

SEQ ID NO: 4012 - DNA, 25 bp, artificial sequence
  antisense probe sequence
ataacctacccacctgtgtaatgtc

SEQ ID NO: 4013 - DNA, 25 bp, artificial sequence
  antisense probe sequence
aatcaatatgcggccccattttgta

SEQ ID NO: 4014 - DNA, 25 bp, artificial sequence
  antisense probe sequence
acagagacgcaagagaaaaatccac

SEQ ID NO: 4015 - DNA, 25 bp, artificial sequence
  antisense probe sequence
aatccactgccttccaaagaaacga

SEQ ID NO: 4016 - DNA, 25 bp, artificial sequence
  antisense probe sequence
cactgccttccaaagaaacgattga

SEQ ID NO: 4017 - DNA, 25 bp, artificial sequence
  antisense probe sequence
ggagaagcaagcaggcgaatcgtaa

SEQ ID NO: 4018 - DNA, 25 bp, artificial sequence
  antisense probe sequence
agcaggcgaatcgtaatgaggcgtg

SEQ ID NO: 4019 - DNA, 25 bp, artificial sequence
  antisense probe sequence
tgcactgtacattccacaagcattg

SEQ ID NO: 4020 - DNA, 25 bp, artificial sequence
  antisense probe sequence
actgtacattccacaagcattgcct

SEQ ID NO: 4021 - DNA, 25 bp, artificial sequence
  antisense probe sequence
agatgcaaagaggttggatcaagtt

SEQ ID NO: 4022 - DNA, 25 bp, artificial sequence
  antisense probe sequence
aagtttaaatgactgtgctgcccct

SEQ ID NO: 4023 - DNA, 25 bp, artificial sequence
  antisense probe sequence
gaaagaacttgcatgttggtgaagg

SEQ ID NO: 4024 - DNA, 25 bp, artificial sequence
  antisense probe sequence
gctgtaatgcagtttaatcagagtg

SEQ ID NO: 4025 - DNA, 25 bp, artificial sequence
  antisense probe sequence
cactactgctgcagctcacaaacac

SEQ ID NO: 4026 - DNA, 25 bp, artificial sequence
  antisense probe sequence
gctcacaaacacctctgcatattac

SEQ ID NO: 4027 - DNA, 25 bp, artificial sequence
  antisense probe sequence
tctgcatattacatgtacctcctcc

SEQ ID NO: 4028 - DNA, 25 bp, artificial sequence
  antisense probe sequence
gtgtggtctattttgccatcatcac

SEQ ID NO: 4029 - DNA, 25 bp, artificial sequence
  antisense probe sequence
ggccatttcagttctcatgtgtgta

SEQ ID NO: 4030 - DNA, 25 bp, artificial sequence
  antisense probe sequence
ggttttcaaaccagtgggcacacag

SEQ ID NO: 4031 - DNA, 25 bp, artificial sequence
  antisense probe sequence
tccctctcttagtgttctttaatca

SEQ ID NO: 4032 - DNA, 25 bp, artificial sequence
  antisense probe sequence
ataactgcctggaagcctttcattt

SEQ ID NO: 4033 - DNA, 25 bp, artificial sequence
  antisense probe sequence
tggaagcctttcattttacacgccc

SEQ ID NO: 4034 - DNA, 25 bp, artificial sequence
  antisense probe sequence
cgccctgaagcagtcttctttgcta

SEQ ID NO: 4035 - DNA, 25 bp, artificial sequence
  antisense probe sequence
ttatgtggtgtgtttttccgtaata

SEQ ID NO: 4036 - DNA, 25 bp, artificial sequence
  antisense probe sequence
cgacagtgcccaggggtctgagtct

SEQ ID NO: 4037 - DNA, 25 bp, artificial sequence
  antisense probe sequence
aaagcctgagacagctgccttgtgt

SEQ ID NO: 4038 - DNA, 25 bp, artificial sequence
  antisense probe sequence
gctgccttgtgtgcgactgagatgc

SEQ ID NO: 4039 - DNA, 25 bp, artificial sequence
  antisense probe sequence
tgagatgcaggatttcctcacgcct

SEQ ID NO: 4040 - DNA, 25 bp, artificial sequence
  antisense probe sequence
ggcttctctttttgcaagggcctct

SEQ ID NO: 4041 - DNA, 25 bp, artificial sequence
  antisense probe sequence
tctgtctgtgtccctgttagcacaa

SEQ ID NO: 4042 - DNA, 25 bp, artificial sequence
  antisense probe sequence
gaacctgggcagagtgcggcagtca

SEQ ID NO: 4043 - DNA, 25 bp, artificial sequence
  antisense probe sequence
atcgaaaccatcctgctaagaggtg

SEQ ID NO: 4044 - DNA, 25 bp, artificial sequence
  antisense probe sequence
gctaagaggtgaaccgtctctacta

SEQ ID NO: 4045 - DNA, 25 bp, artificial sequence
  antisense probe sequence
tggcgcagaggcaggctgtgatcca

SEQ ID NO: 4046 - DNA, 25 bp, artificial sequence
  antisense probe sequence
gtgatccagctactcaggagcgagc

SEQ ID NO: 4047 - DNA, 25 bp, artificial sequence
  antisense probe sequence
gatgacaattcagaccaggctcacc

SEQ ID NO: 4048 - DNA, 25 bp, artificial sequence
  antisense probe sequence
ggtgccgtcacttaggaatgctgga

SEQ ID NO: 4049 - DNA, 25 bp, artificial sequence
  antisense probe sequence
agacatgccatctctagaacctttt

SEQ ID NO: 4050 - DNA, 25 bp, artificial sequence
  antisense probe sequence
gcgagtccagaaacattattgccca

SEQ ID NO: 4051 - DNA, 25 bp, artificial sequence
  antisense probe sequence
aggagcgcaggaagtcactaccatt

SEQ ID NO: 4052 - DNA, 25 bp, artificial sequence
  antisense probe sequence
gttcataggacttctgatgtgttca

SEQ ID NO: 4053 - DNA, 25 bp, artificial sequence
  antisense probe sequence
gagatcattatgctttgtgccctgg

SEQ ID NO: 4054 - DNA, 25 bp, artificial sequence
  antisense probe sequence
ggcaagggcagcttcattctaagcc

SEQ ID NO: 4055 - DNA, 25 bp, artificial sequence
  antisense probe sequence
caacactaaggctcctctgtcagag

SEQ ID NO: 4056 - DNA, 25 bp, artificial sequence
  antisense probe sequence
agaggaggtcgtcttgtttttgctt

SEQ ID NO: 4057 - DNA, 25 bp, artificial sequence
  antisense probe sequence
ttcattgcatgacataacccttccc

SEQ ID NO: 4058 - DNA, 25 bp, artificial sequence
  antisense probe sequence
tacgtcaaagaccgctgctgcagta

SEQ ID NO: 4059 - DNA, 25 bp, artificial sequence
  antisense probe sequence
gcagtagctgcccagtcaggaatac

SEQ ID NO: 4060 - DNA, 25 bp, artificial sequence
  antisense probe sequence
gctacacatcatgtccactggtgac

SEQ ID NO: 4061 - DNA, 25 bp, artificial sequence
  antisense probe sequence
cactggtgaccggctacaaccgtgt

SEQ ID NO: 4062 - DNA, 25 bp, artificial sequence
  antisense probe sequence
acaaccgtgtgattcttgctgagtt

SEQ ID NO: 4063 - DNA, 25 bp, artificial sequence
  antisense probe sequence
gcgcctttccatgtatctcatgaaa

SEQ ID NO: 4064 - DNA, 25 bp, artificial sequence
  antisense probe sequence
gaccagcgtttctgcgcaagttgtt

SEQ ID NO: 4065 - DNA, 25 bp, artificial sequence
  antisense probe sequence
taaggatggctcagcacttgctcat

SEQ ID NO: 4066 - DNA, 25 bp, artificial sequence
  antisense probe sequence
ggcttctgggccaaaactgcagtca

SEQ ID NO: 4067 - DNA, 25 bp, artificial sequence
  antisense probe sequence
gtaatggtgaccaaatgcctccctt

SEQ ID NO: 4068 - DNA, 25 bp, artificial sequence
  antisense probe sequence
gtgggctactcatgatgggcttgat

SEQ ID NO: 4069 - DNA, 25 bp, artificial sequence
  antisense probe sequence
tctggacatgagcctttgacctggg

SEQ ID NO: 4070 - DNA, 25 bp, artificial sequence
  antisense probe sequence
agaaagaaccacaaactccatctcc

SEQ ID NO: 4071 - DNA, 25 bp, artificial sequence
  antisense probe sequence
aactccatctcccaatagaactttg

SEQ ID NO: 4072 - DNA, 25 bp, artificial sequence
  antisense probe sequence
ttgaaattcactcagcttttccttt

SEQ ID NO: 4073 - DNA, 25 bp, artificial sequence
  antisense probe sequence
ttttcctttcatgctgtttgttgcc

SEQ ID NO: 4074 - DNA, 25 bp, artificial sequence
  antisense probe sequence
tcctgccccagaactgcaagatttt

SEQ ID NO: 4075 - DNA, 25 bp, artificial sequence
  antisense probe sequence
gcttcacccctttctgagagtaatg

SEQ ID NO: 4076 - DNA, 25 bp, artificial sequence
  antisense probe sequence
ccctgtattctgtgcttcatcgaat

SEQ ID NO: 4077 - DNA, 25 bp, artificial sequence
  antisense probe sequence
gcaagactgacctcttttaagcatt

SEQ ID NO: 4078 - DNA, 25 bp, artificial sequence
  antisense probe sequence
aagcatttaattcactcccagagtc

SEQ ID NO: 4079 - DNA, 25 bp, artificial sequence
  antisense probe sequence
gggacactgagcttacttaatacat

SEQ ID NO: 4080 - DNA, 25 bp, artificial sequence
  antisense probe sequence
tgccgtcagccgaactttgttatgg

SEQ ID NO: 4081 - DNA, 25 bp, artificial sequence
  antisense probe sequence
tggagggagcagcctcacacaagca

SEQ ID NO: 4082 - DNA, 25 bp, artificial sequence
  antisense probe sequence
gaaacactcctgtggatggtattgt

SEQ ID NO: 4083 - DNA, 25 bp, artificial sequence
  antisense probe sequence
tagtcaatagaccctctccttataa

SEQ ID NO: 4084 - DNA, 25 bp, artificial sequence
  antisense probe sequence
gcagaggatattggagccccttttt

SEQ ID NO: 4085 - DNA, 25 bp, artificial sequence
  antisense probe sequence
agcccctttttgtgacattaccaat

SEQ ID NO: 4086 - DNA, 25 bp, artificial sequence
  antisense probe sequence
taccaattacatctttgtccacgtt

SEQ ID NO: 4087 - DNA, 25 bp, artificial sequence
  antisense probe sequence
tgtccacgtttaatactttgttttg

SEQ ID NO: 4088 - DNA, 25 bp, artificial sequence
  antisense probe sequence
atgttttccatatactttgtcttgc

SEQ ID NO: 4089 - DNA, 25 bp, artificial sequence
  antisense probe sequence
tactttgtcttgcctgtatgcagcc

SEQ ID NO: 4090 - DNA, 25 bp, artificial sequence
  antisense probe sequence
gtatgcagcccttgtgtaatatggt

SEQ ID NO: 4091 - DNA, 25 bp, artificial sequence
  antisense probe sequence
tcacctctagaatagccacccaaag

SEQ ID NO: 4092 - DNA, 25 bp, artificial sequence
  antisense probe sequence
agaccttcctgaggctgcctcagaa

SEQ ID NO: 4093 - DNA, 25 bp, artificial sequence
  antisense probe sequence
cctcagaagcaccacttgctgtttt

SEQ ID NO: 4094 - DNA, 25 bp, artificial sequence
  antisense probe sequence
gaagatagctgctgttcccatgatg

SEQ ID NO: 4095 - DNA, 25 bp, artificial sequence
  antisense probe sequence
tcccatgatgggcacatttcctgag

SEQ ID NO: 4096 - DNA, 25 bp, artificial sequence
  antisense probe sequence
actgatgagcatagagcacccctgc

SEQ ID NO: 4097 - DNA, 25 bp, artificial sequence
  antisense probe sequence
caggaaacctgaccggcaggggctc

SEQ ID NO: 4098 - DNA, 25 bp, artificial sequence
  antisense probe sequence
ctctggcttcctgaaagcttcacct

SEQ ID NO: 4099 - DNA, 25 bp, artificial sequence
  antisense probe sequence
tcttccctcgtttatatctcaactg

SEQ ID NO: 4100 - DNA, 25 bp, artificial sequence
  antisense probe sequence
gcaactcagactgtctggagcttgc

SEQ ID NO: 4101 - DNA, 25 bp, artificial sequence
  antisense probe sequence
gtttcagaactttccttaggacttg

SEQ ID NO: 4102 - DNA, 25 bp, artificial sequence
  antisense probe sequence
tctaccctgcggagatcacgctgac

SEQ ID NO: 4103 - DNA, 25 bp, artificial sequence
  antisense probe sequence
ggaacagacccaggacacagagctt

SEQ ID NO: 4104 - DNA, 25 bp, artificial sequence
  antisense probe sequence
cagagcttgtggagaccaggcctgc

SEQ ID NO: 4105 - DNA, 25 bp, artificial sequence
  antisense probe sequence
aggcctgcaggggatggaaccttcc

SEQ ID NO: 4106 - DNA, 25 bp, artificial sequence
  antisense probe sequence
tccagaagtgggccgctgtggtggt

SEQ ID NO: 4107 - DNA, 25 bp, artificial sequence
  antisense probe sequence
cagcccctcatcctgagatgggagc

SEQ ID NO: 4108 - DNA, 25 bp, artificial sequence
  antisense probe sequence
tgttgtccttggagctgtggtcact

SEQ ID NO: 4109 - DNA, 25 bp, artificial sequence
  antisense probe sequence
ctgtggtcgctgctgtgatgtggag

SEQ ID NO: 4110 - DNA, 25 bp, artificial sequence
  antisense probe sequence
agctactctcaggctgcagtgtgag

SEQ ID NO: 4111 - DNA, 25 bp, artificial sequence
  antisense probe sequence
gtgagacagcttccttgtgtgggac

SEQ ID NO: 4112 - DNA, 25 bp, artificial sequence
  antisense probe sequence
attgcacttgtgcctcacgaacata

SEQ ID NO: 4113 - DNA, 25 bp, artificial sequence
  antisense probe sequence
atacttgagattttcctccattttt

SEQ ID NO: 4114 - DNA, 25 bp, artificial sequence
  antisense probe sequence
aaattgttaaacttgcagcttggta

SEQ ID NO: 4115 - DNA, 25 bp, artificial sequence
  antisense probe sequence
gagaatgccactttggctgaactac

SEQ ID NO: 4116 - DNA, 25 bp, artificial sequence
  antisense probe sequence
actacaagtgtaggccaccattata

SEQ ID NO: 4117 - DNA, 25 bp, artificial sequence
  antisense probe sequence
tggaccttttataaccttgttctct

SEQ ID NO: 4118 - DNA, 25 bp, artificial sequence
  antisense probe sequence
cagactcaagagaaactacccaggt

SEQ ID NO: 4119 - DNA, 25 bp, artificial sequence
  antisense probe sequence
actacccaggtattacacaagccaa

SEQ ID NO: 4120 - DNA, 25 bp, artificial sequence
  antisense probe sequence
aaatgggagcaaggccttctctcca

SEQ ID NO: 4121 - DNA, 25 bp, artificial sequence
  antisense probe sequence
cttctctccagactatcgtaacctg

SEQ ID NO: 4122 - DNA, 25 bp, artificial sequence
  antisense probe sequence
atcgtaacctggtgccttaccaagt

SEQ ID NO: 4123 - DNA, 25 bp, artificial sequence
  antisense probe sequence
gccttaccaagttgtgcttttctgt

SEQ ID NO: 4124 - DNA, 25 bp, artificial sequence
  antisense probe sequence
ggcagctgcagacaagtggttaact

SEQ ID NO: 4125 - DNA, 25 bp, artificial sequence
  antisense probe sequence
gacaagtggttaactggtttggcag

SEQ ID NO: 4126 - DNA, 25 bp, artificial sequence
  antisense probe sequence
ttggcagaatggcatgttcctgctg

SEQ ID NO: 4127 - DNA, 25 bp, artificial sequence
  antisense probe sequence
gatgggggtattaatgctccctgga

SEQ ID NO: 4128 - DNA, 25 bp, artificial sequence
  antisense probe sequence
gctccctggaaatgctttctacgtc

SEQ ID NO: 4129 - DNA, 25 bp, artificial sequence
  antisense probe sequence
ctacgtcgatagctcagctcctagc

SEQ ID NO: 4130 - DNA, 25 bp, artificial sequence
  antisense probe sequence
tcctagcccttacttgagagcatcc

SEQ ID NO: 4131 - DNA, 25 bp, artificial sequence
  antisense probe sequence
gatgtggccttccaggtattagcac

SEQ ID NO: 4132 - DNA, 25 bp, artificial sequence
  antisense probe sequence
ggccttccaggtattagcacaactt

SEQ ID NO: 4133 - DNA, 25 bp, artificial sequence
  antisense probe sequence
actctggcctgcatggcagaacaag

SEQ ID NO: 4134 - DNA, 25 bp, artificial sequence
  antisense probe sequence
aaatcaaactaatcatgctgctcat

SEQ ID NO: 4135 - DNA, 25 bp, artificial sequence
  antisense probe sequence
aaaatactggacccacttctttcag

SEQ ID NO: 4136 - DNA, 25 bp, artificial sequence
  antisense probe sequence
gaagataccttatatgccctaaagt

SEQ ID NO: 4137 - DNA, 25 bp, artificial sequence
  antisense probe sequence
gccctaaagttaataccagcagtca

SEQ ID NO: 4138 - DNA, 25 bp, artificial sequence
  antisense probe sequence
ggctgtgacacttctttgtggtact

SEQ ID NO: 4139 - DNA, 25 bp, artificial sequence
  antisense probe sequence
accctttgcagaagattcccttgta

SEQ ID NO: 4140 - DNA, 25 bp, artificial sequence
  antisense probe sequence
ttcccttgtaaatggccctgtggca

SEQ ID NO: 4141 - DNA, 25 bp, artificial sequence
  antisense probe sequence
ggcatgcccagtatctgcaatgttc

SEQ ID NO: 4142 - DNA, 25 bp, artificial sequence
  antisense probe sequence
ggcaaacctctctgtttgccaagcc

SEQ ID NO: 4143 - DNA, 25 bp, artificial sequence
  antisense probe sequence
gtttgccaagcctgcagagttgaac

SEQ ID NO: 4144 - DNA, 25 bp, artificial sequence
  antisense probe sequence
tacaatctgaccctgttttttggcc

SEQ ID NO: 4145 - DNA, 25 bp, artificial sequence
  antisense probe sequence
ccctgtttctggacactgtagctga

SEQ ID NO: 4146 - DNA, 25 bp, artificial sequence
  antisense probe sequence
gattcctggtctttttaacacgaag

SEQ ID NO: 4147 - DNA, 25 bp, artificial sequence
  antisense probe sequence
tctcttttgtaggatctgtatgatt

SEQ ID NO: 4148 - DNA, 25 bp, artificial sequence
  antisense probe sequence
attttaatatttgcacctttgtgaa

SEQ ID NO: 4149 - DNA, 25 bp, artificial sequence
  antisense probe sequence
aaattaagcactatcaccaccttca

SEQ ID NO: 4150 - DNA, 25 bp, artificial sequence
  antisense probe sequence
acagctacttaggagatccacaatc

SEQ ID NO: 4151 - DNA, 25 bp, artificial sequence
  antisense probe sequence
gatccacaatcctgggttgggagcc

SEQ ID NO: 4152 - DNA, 25 bp, artificial sequence
  antisense probe sequence
gagccagtggatttcctgaaacaca

SEQ ID NO: 4153 - DNA, 25 bp, artificial sequence
  antisense probe sequence
acacagatttgttaatgcgtttata

SEQ ID NO: 4154 - DNA, 25 bp, artificial sequence
  antisense probe sequence
gtgcagtgaccatcattgactttca

SEQ ID NO: 4155 - DNA, 25 bp, artificial sequence
  antisense probe sequence
aattcaatcctgtgtatttattcct

SEQ ID NO: 4156 - DNA, 25 bp, artificial sequence
  antisense probe sequence
tttattccttcttctgtaatgacca

SEQ ID NO: 4157 - DNA, 25 bp, artificial sequence
  antisense probe sequence
gaccagctccaggagctctgcatcc

SEQ ID NO: 4158 - DNA, 25 bp, artificial sequence
  antisense probe sequence
gcgtggtatttgggagccagcggcc

SEQ ID NO: 4159 - DNA, 25 bp, artificial sequence
  antisense probe sequence
ttgattctgtggcccagcagcaggg

SEQ ID NO: 4160 - DNA, 25 bp, artificial sequence
  antisense probe sequence
ctgccgcatgttgctgactttcggt

SEQ ID NO: 4161 - DNA, 25 bp, artificial sequence
  antisense probe sequence
gagcgtcctgatgcagctgaagctt

SEQ ID NO: 4162 - DNA, 25 bp, artificial sequence
  antisense probe sequence
tgggtcagcataccgctttgaggtc

SEQ ID NO: 4163 - DNA, 25 bp, artificial sequence
  antisense probe sequence
gccaagttccaggagctgcggtaca

SEQ ID NO: 4164 - DNA, 25 bp, artificial sequence
  antisense probe sequence
tcacttgaccagtcccattcagatc

SEQ ID NO: 4165 - DNA, 25 bp, artificial sequence
  antisense probe sequence
ggtgccaaagtgcagctgactcttc

SEQ ID NO: 4166 - DNA, 25 bp, artificial sequence
  antisense probe sequence
ttcccatgaggcaggctcttcagtg

SEQ ID NO: 4167 - DNA, 25 bp, artificial sequence
  antisense probe sequence
gagctatgcctttttttctttttgg

SEQ ID NO: 4168 - DNA, 25 bp, artificial sequence
  antisense probe sequence
caacattctcttctcaaacactgac

SEQ ID NO: 4169 - DNA, 25 bp, artificial sequence
  antisense probe sequence
tgtgggtcacagcagtgagctccca

SEQ ID NO: 4170 - DNA, 25 bp, artificial sequence
  antisense probe sequence
ccacccgccttgcagtgaagatgtg

SEQ ID NO: 4171 - DNA, 25 bp, artificial sequence
  antisense probe sequence
ggagagggagtgtctccttccaggt

SEQ ID NO: 4172 - DNA, 25 bp, artificial sequence
  antisense probe sequence
aggtgctagctctggacagcagctg

SEQ ID NO: 4173 - DNA, 25 bp, artificial sequence
  antisense probe sequence
ggaaagtttcttcatcgttgtcctc

SEQ ID NO: 4174 - DNA, 25 bp, artificial sequence
  antisense probe sequence
cctccctgctggtcacatgagttta

SEQ ID NO: 4175 - DNA, 25 bp, artificial sequence
  antisense probe sequence
acgattccttagaagtgtctcccac

SEQ ID NO: 4176 - DNA, 25 bp, artificial sequence
  antisense probe sequence
gagaatctctgaggcgtgtcttcca

SEQ ID NO: 4177 - DNA, 25 bp, artificial sequence
  antisense probe sequence
tgccctccacagtgtaggcttgaac

SEQ ID NO: 4178 - DNA, 25 bp, artificial sequence
  antisense probe sequence
aggcttgaacacttggcctcatgcg

SEQ ID NO: 4179 - DNA, 25 bp, artificial sequence
  antisense probe sequence
gcagaacatatgtaaccagaaggac

SEQ ID NO: 4180 - DNA, 25 bp, artificial sequence
  antisense probe sequence
ttgagtgcaagtgggctgagtctga

SEQ ID NO: 4181 - DNA, 25 bp, artificial sequence
  antisense probe sequence
gtgcaagtgggctgagtctgaaaac

SEQ ID NO: 4182 - DNA, 25 bp, artificial sequence
  antisense probe sequence
aagtggttatctattgttagcagag

SEQ ID NO: 4183 - DNA, 25 bp, artificial sequence
  antisense probe sequence
ggggagatgataagacccattgtcc

SEQ ID NO: 4184 - DNA, 25 bp, artificial sequence
  antisense probe sequence
atgataagacccattgtccagaaga

SEQ ID NO: 4185 - DNA, 25 bp, artificial sequence
  antisense probe sequence
gactgtcacaaggtcgattgatcag

SEQ ID NO: 4186 - DNA, 25 bp, artificial sequence
  antisense probe sequence
gacagggacaggtcacaatggtgga

SEQ ID NO: 4187 - DNA, 25 bp, artificial sequence
  antisense probe sequence
aatggtggaatgttgtaatgttggt

SEQ ID NO: 4188 - DNA, 25 bp, artificial sequence
  antisense probe sequence
tttacttcttgtgtggtttttcagc

SEQ ID NO: 4189 - DNA, 25 bp, artificial sequence
  antisense probe sequence
ttcttgtgtggtttttcagctgccc

SEQ ID NO: 4190 - DNA, 25 bp, artificial sequence
  antisense probe sequence
accaagcctggctttatgtatttat

SEQ ID NO: 4191 - DNA, 25 bp, artificial sequence
  antisense probe sequence
acagaaggttatgcctggctcccag

SEQ ID NO: 4192 - DNA, 25 bp, artificial sequence
  antisense probe sequence
tgggggaggagtcatggtttatttg

SEQ ID NO: 4193 - DNA, 25 bp, artificial sequence
  antisense probe sequence
tgccttagtttcttagcccatgaaa

SEQ ID NO: 4194 - DNA, 25 bp, artificial sequence
  antisense probe sequence
gacccagggactacctcaagggctt

SEQ ID NO: 4195 - DNA, 25 bp, artificial sequence
  antisense probe sequence
ggaagatgcaagagcctttagtacc

SEQ ID NO: 4196 - DNA, 25 bp, artificial sequence
  antisense probe sequence
agagcctttagtaccaaggttctca

SEQ ID NO: 4197 - DNA, 25 bp, artificial sequence
  antisense probe sequence
cccggacagttaaatcagaacctca

SEQ ID NO: 4198 - DNA, 25 bp, artificial sequence
  antisense probe sequence
cagaacctcagacagcaatatgcct

SEQ ID NO: 4199 - DNA, 25 bp, artificial sequence
  antisense probe sequence
atatgccttgagatgccttgaacca

SEQ ID NO: 4200 - DNA, 25 bp, artificial sequence
  antisense probe sequence
gagatgccttgaaccatgcttgaga

SEQ ID NO: 4201 - DNA, 25 bp, artificial sequence
  antisense probe sequence
ggcgctgatgcgaatacagctcaca

SEQ ID NO: 4202 - DNA, 25 bp, artificial sequence
  antisense probe sequence
gattgatttcacagggagctctaat

SEQ ID NO: 4203 - DNA, 25 bp, artificial sequence
  antisense probe sequence
atctctgtgattacatggtccttca

SEQ ID NO: 4204 - DNA, 25 bp, artificial sequence
  antisense probe sequence
ccttcaaactcccaaccaaagtgag

SEQ ID NO: 4205 - DNA, 25 bp, artificial sequence
  antisense probe sequence
tgagcagccctttagcaaaatcgcc

SEQ ID NO: 4206 - DNA, 25 bp, artificial sequence
  antisense probe sequence
ctccctccacctgacagtttgtaag

SEQ ID NO: 4207 - DNA, 25 bp, artificial sequence
  antisense probe sequence
atctaacctgatgctcttggagaga

SEQ ID NO: 4208 - DNA, 25 bp, artificial sequence
  antisense probe sequence
gagataacctgtctgtcataactta

SEQ ID NO: 4209 - DNA, 25 bp, artificial sequence
  antisense probe sequence
gctattaaagattcatgcagtccca

SEQ ID NO: 4210 - DNA, 25 bp, artificial sequence
  antisense probe sequence
tgcagtcccaaaaggcactgtcctg

SEQ ID NO: 4211 - DNA, 25 bp, artificial sequence
  antisense probe sequence
cataaaaggaatccaaccctgtgcc

SEQ ID NO: 4212 - DNA, 25 bp, artificial sequence
  antisense probe sequence
gaagccttactacaattccaaaaat

SEQ ID NO: 4213 - DNA, 25 bp, artificial sequence
  antisense probe sequence
atcatcatggttggaaatttgggag

SEQ ID NO: 4214 - DNA, 25 bp, artificial sequence
  antisense probe sequence
tatttgtgaacttgttacccttttg

SEQ ID NO: 4215 - DNA, 25 bp, artificial sequence
  antisense probe sequence
gtaatggtggactaattgctgtata

SEQ ID NO: 4216 - DNA, 25 bp, artificial sequence
  antisense probe sequence
tacacggtacttggagcagtcagcc

SEQ ID NO: 4217 - DNA, 25 bp, artificial sequence
  antisense probe sequence
tcacagatactgctttcacttaaat

SEQ ID NO: 4218 - DNA, 25 bp, artificial sequence
  antisense probe sequence
aattctccgataatgctttgctttt

SEQ ID NO: 4219 - DNA, 25 bp, artificial sequence
  antisense probe sequence
gtcactcttgtgtactatctatttt

SEQ ID NO: 4220 - DNA, 25 bp, artificial sequence
  antisense probe sequence
ttgtgtactatctatttttctcctc

SEQ ID NO: 4221 - DNA, 25 bp, artificial sequence
  antisense probe sequence
aagcaataatatctctgttttcatt

SEQ ID NO: 4222 - DNA, 25 bp, artificial sequence
  antisense probe sequence
atctctgttttcatttcagaacatt

SEQ ID NO: 4223 - DNA, 25 bp, artificial sequence
  antisense probe sequence
cctctggatattgatgcctcgggtg

SEQ ID NO: 4224 - DNA, 25 bp, artificial sequence
  antisense probe sequence
tggacaccgaatccagagtgccact

SEQ ID NO: 4225 - DNA, 25 bp, artificial sequence
  antisense probe sequence
cactgtgctcctcaacgaggacgtc

SEQ ID NO: 4226 - DNA, 25 bp, artificial sequence
  antisense probe sequence
gatgagaagactgctgaggctgcga

SEQ ID NO: 4227 - DNA, 25 bp, artificial sequence
  antisense probe sequence
tgaggctgcgatgcagcgcctcaaa

SEQ ID NO: 4228 - DNA, 25 bp, artificial sequence
  antisense probe sequence
aaagcggccaacattccagagcata

SEQ ID NO: 4229 - DNA, 25 bp, artificial sequence
  antisense probe sequence
gagcataacaccattggcttcatgt

SEQ ID NO: 4230 - DNA, 25 bp, artificial sequence
  antisense probe sequence
ggcttcatgtttgcatgcgttggca

SEQ ID NO: 4231 - DNA, 25 bp, artificial sequence
  antisense probe sequence
gttggcaggggctttcagtattaca

SEQ ID NO: 4232 - DNA, 25 bp, artificial sequence
  antisense probe sequence
tcccttattcggcttctttggaaat

SEQ ID NO: 4233 - DNA, 25 bp, artificial sequence
  antisense probe sequence
atggcactcatacatctggggtcat

SEQ ID NO: 4234 - DNA, 25 bp, artificial sequence
  antisense probe sequence
acatatgtcggctaccgtgtctggc

SEQ ID NO: 4235 - DNA, 25 bp, artificial sequence
  antisense probe sequence
tgtctggccgttcacatctttggcc

SEQ ID NO: 4236 - DNA, 25 bp, artificial sequence
  antisense probe sequence
acatctttggccactatttgcttgt

SEQ ID NO: 4237 - DNA, 25 bp, artificial sequence
  antisense probe sequence
taagatgcactgtaacatctctgaa

SEQ ID NO: 4238 - DNA, 25 bp, artificial sequence
  antisense probe sequence
gttttgttagcaatacactgtcttt

SEQ ID NO: 4239 - DNA, 25 bp, artificial sequence
  antisense probe sequence
tacactgtcttttagtggtgcctaa

SEQ ID NO: 4240 - DNA, 25 bp, artificial sequence
  antisense probe sequence
gaagcacagtatgcaggtaggccta

SEQ ID NO: 4241 - DNA, 25 bp, artificial sequence
  antisense probe sequence
gcaggtaggcctaatgggggaagat

SEQ ID NO: 4242 - DNA, 25 bp, artificial sequence
  antisense probe sequence
aagctgttctgtggatgacctaccc

SEQ ID NO: 4243 - DNA, 25 bp, artificial sequence
  antisense probe sequence
ttaaacacgattctctcacttccaa

SEQ ID NO: 4244 - DNA, 25 bp, artificial sequence
  antisense probe sequence
ccaactccaaacttgctcaactaat

SEQ ID NO: 4245 - DNA, 25 bp, artificial sequence
  antisense probe sequence
gcaccttacatatttgatgctcagg

SEQ ID NO: 4246 - DNA, 25 bp, artificial sequence
  antisense probe sequence
ccacccttacatctccatagttggt

SEQ ID NO: 4247 - DNA, 25 bp, artificial sequence
  antisense probe sequence
gttggtacagttagcttgtagcagc

SEQ ID NO: 4248 - DNA, 25 bp, artificial sequence
  antisense probe sequence
atgcctggagatcactgtctgttgg

SEQ ID NO: 4249 - DNA, 25 bp, artificial sequence
  antisense probe sequence
ctgtctgttggtctgatctcagtat

SEQ ID NO: 4250 - DNA, 25 bp, artificial sequence
  antisense probe sequence
cagtatcatactgagacacctcccc

SEQ ID NO: 4251 - DNA, 25 bp, artificial sequence
  antisense probe sequence
cctgagccttacctacttaaattgg

SEQ ID NO: 4252 - DNA, 25 bp, artificial sequence
  antisense probe sequence
gaggcaagttgcaagggagccagag

SEQ ID NO: 4253 - DNA, 25 bp, artificial sequence
  antisense probe sequence
aatttctttggcacattgacttact

SEQ ID NO: 4254 - DNA, 25 bp, artificial sequence
  antisense probe sequence
ggcacattgacttactgatatcttt

SEQ ID NO: 4255 - DNA, 25 bp, artificial sequence
  antisense probe sequence
tattccccggcgcaataaaaatgcc

SEQ ID NO: 4256 - DNA, 25 bp, artificial sequence
  antisense probe sequence
agtgggggggtggtcagtggaagct

SEQ ID NO: 4257 - DNA, 25 bp, artificial sequence
  antisense probe sequence
agctggggaggcttcactcagctca

SEQ ID NO: 4258 - DNA, 25 bp, artificial sequence
  antisense probe sequence
tcactgctctctccatggggagggg

SEQ ID NO: 4259 - DNA, 25 bp, artificial sequence
  antisense probe sequence
cagggcaccaagttcgggatcctag

SEQ ID NO: 4260 - DNA, 25 bp, artificial sequence
  antisense probe sequence
ccccactctcaggctaggatggaga

SEQ ID NO: 4261 - DNA, 25 bp, artificial sequence
  antisense probe sequence
cccccccgcatacttgaatgtatgt

SEQ ID NO: 4262 - DNA, 25 bp, artificial sequence
  antisense probe sequence
gtatgtgcgtatttattgctcacgt

SEQ ID NO: 4263 - DNA, 25 bp, artificial sequence
  antisense probe sequence
atttattgctcacgtctgtgccatg

SEQ ID NO: 4264 - DNA, 25 bp, artificial sequence
  antisense probe sequence
tcacgtctgtgccatgttgtcaatg

SEQ ID NO: 4265 - DNA, 25 bp, artificial sequence
  antisense probe sequence
tgttgtcaatgggtcctttccaacc

SEQ ID NO: 4266 - DNA, 25 bp, artificial sequence
  antisense probe sequence
ctttccaacccaagaggtacatttg

SEQ ID NO: 4267 - DNA, 25 bp, artificial sequence
  antisense probe sequence
gaaactctggaaatcacgtgtgtgg

SEQ ID NO: 4268 - DNA, 25 bp, artificial sequence
  antisense probe sequence
tgtggggagatggggacgcttccca

SEQ ID NO: 4269 - DNA, 25 bp, artificial sequence
  antisense probe sequence
ggacgcttcccatgttgtggggagc

SEQ ID NO: 4270 - DNA, 25 bp, artificial sequence
  antisense probe sequence
cccatgttgtggggagctctgtggc

SEQ ID NO: 4271 - DNA, 25 bp, artificial sequence
  antisense probe sequence
cctgcaactcacgtcaatcatagaa

SEQ ID NO: 4272 - DNA, 25 bp, artificial sequence
  antisense probe sequence
attgtgacgcacagttggcaaaata

SEQ ID NO: 4273 - DNA, 25 bp, artificial sequence
  antisense probe sequence
tagttctttatgctatttctcaaaa

SEQ ID NO: 4274 - DNA, 25 bp, artificial sequence
  antisense probe sequence
gaggacaaacccagattgggattgg

SEQ ID NO: 4275 - DNA, 25 bp, artificial sequence
  antisense probe sequence
ttgggattggaatatgcactgtaaa

SEQ ID NO: 4276 - DNA, 25 bp, artificial sequence
  antisense probe sequence
tgcactgtaaatcaaatttttctta

SEQ ID NO: 4277 - DNA, 25 bp, artificial sequence
  antisense probe sequence
tgtgtaaacacacagcttccttgtg

SEQ ID NO: 4278 - DNA, 25 bp, artificial sequence
  antisense probe sequence
caacattctcttctcaaacactgac

SEQ ID NO: 4279 - DNA, 25 bp, artificial sequence
  antisense probe sequence
tgtgggtcacagcagtgagctccca

SEQ ID NO: 4280 - DNA, 25 bp, artificial sequence
  antisense probe sequence
ccacccgccttgcagtgaagatgtg

SEQ ID NO: 4281 - DNA, 25 bp, artificial sequence
  antisense probe sequence
ggagagggagtgtctccttccaggt

SEQ ID NO: 4282 - DNA, 25 bp, artificial sequence
  antisense probe sequence
aggtgctagctctggacagcagctg

SEQ ID NO: 4283 - DNA, 25 bp, artificial sequence
  antisense probe sequence
ggaaagtttcttcatcgttgtcctc

SEQ ID NO: 4284 - DNA, 25 bp, artificial sequence
  antisense probe sequence
cctccctgctggtcacatgagttta

SEQ ID NO: 4285 - DNA, 25 bp, artificial sequence
  antisense probe sequence
acgattccttagaagtgtctcccac

SEQ ID NO: 4286 - DNA, 25 bp, artificial sequence
  antisense probe sequence
gagaatctctgaggcgtgtcttcca

SEQ ID NO: 4287 - DNA, 25 bp, artificial sequence
  antisense probe sequence
tgtgccctccacagtgtagacttga

SEQ ID NO: 4288 - DNA, 25 bp, artificial sequence
  antisense probe sequence
aacacttggcctcatgtgatccttc

SEQ ID NO: 4289 - DNA, 25 bp, artificial sequence
  antisense probe sequence
ggtcaggggatcagacactccagtt

SEQ ID NO: 4290 - DNA, 25 bp, artificial sequence
  antisense probe sequence
aatggcaaaaggctccatacccttc

SEQ ID NO: 4291 - DNA, 25 bp, artificial sequence
  antisense probe sequence
gggaatgatgataacacccacttca

SEQ ID NO: 4292 - DNA, 25 bp, artificial sequence
  antisense probe sequence
aacacccacttcatagaatggtcat

SEQ ID NO: 4293 - DNA, 25 bp, artificial sequence
  antisense probe sequence
gtcaagcacttagcctctggtgcac

SEQ ID NO: 4294 - DNA, 25 bp, artificial sequence
  antisense probe sequence
taaataagtatacctattcctcctt

SEQ ID NO: 4295 - DNA, 25 bp, artificial sequence
  antisense probe sequence
atattaccaaatgtccagcttatac

SEQ ID NO: 4296 - DNA, 25 bp, artificial sequence
  antisense probe sequence
gctagtgggctatgttagagctact

SEQ ID NO: 4297 - DNA, 25 bp, artificial sequence
  antisense probe sequence
agacagctgtgtgggtgttttttgg

SEQ ID NO: 4298 - DNA, 25 bp, artificial sequence
  antisense probe sequence
tctggtttacaatctcgtcattcaa

SEQ ID NO: 4299 - DNA, 25 bp, artificial sequence
  antisense probe sequence
aggctcatcatttctcagtctgaat

SEQ ID NO: 4300 - DNA, 25 bp, artificial sequence
  antisense probe sequence
gaaatggtggtttccttctgataag

SEQ ID NO: 4301 - DNA, 25 bp, artificial sequence
  antisense probe sequence
ggaccatgtcgcttatatatcaccc

SEQ ID NO: 4302 - DNA, 25 bp, artificial sequence
  antisense probe sequence
cgcttatatatcaccctactagggg

SEQ ID NO: 4303 - DNA, 25 bp, artificial sequence
  antisense probe sequence
gatataattttcccttctaagcaag

SEQ ID NO: 4304 - DNA, 25 bp, artificial sequence
  antisense probe sequence
aatggcagtgctaaatagttttgta

SEQ ID NO: 4305 - DNA, 25 bp, artificial sequence
  antisense probe sequence
aatatttttcagatgcatttgcatt

SEQ ID NO: 4306 - DNA, 25 bp, artificial sequence
  antisense probe sequence
ggactgaaattctgttacatgatgt

SEQ ID NO: 4307 - DNA, 25 bp, artificial sequence
  antisense probe sequence
atataaagcaaattcacacgttttc

SEQ ID NO: 4308 - DNA, 25 bp, artificial sequence
  antisense probe sequence
gaaacctcagtcttgaaattttgat

SEQ ID NO: 4309 - DNA, 25 bp, artificial sequence
  antisense probe sequence
aaaaatcatgacactgttttaccat

SEQ ID NO: 4310 - DNA, 25 bp, artificial sequence
  antisense probe sequence
gagtagctaacttttggtaacacct

SEQ ID NO: 4311 - DNA, 25 bp, artificial sequence
  antisense probe sequence
cacacgcagatcctgcactgtactg

SEQ ID NO: 4312 - DNA, 25 bp, artificial sequence
  antisense probe sequence
atcctgcactgtactgtccagtcaa

SEQ ID NO: 4313 - DNA, 25 bp, artificial sequence
  antisense probe sequence
actgtccagtcaactgacttcagca

SEQ ID NO: 4314 - DNA, 25 bp, artificial sequence
  antisense probe sequence
gatgtctgggttcagcagcgagttg

SEQ ID NO: 4315 - DNA, 25 bp, artificial sequence
  antisense probe sequence
gagttgctgtgtgaggccaccagaa

SEQ ID NO: 4316 - DNA, 25 bp, artificial sequence
  antisense probe sequence
gggagacattcagaatcgaggcgaa

SEQ ID NO: 4317 - DNA, 25 bp, artificial sequence
  antisense probe sequence
cctcagtgctcctcttggaggcaga

SEQ ID NO: 4318 - DNA, 25 bp, artificial sequence
  antisense probe sequence
gtgaatgtggaagaccagcagattg

SEQ ID NO: 4319 - DNA, 25 bp, artificial sequence
  antisense probe sequence
gtggtgaagtggccctgcacaaaac

SEQ ID NO: 4320 - DNA, 25 bp, artificial sequence
  antisense probe sequence
aagtggccctgcacaaaacgttgct

SEQ ID NO: 4321 - DNA, 25 bp, artificial sequence
  antisense probe sequence
tagtaaagctaagttttatctcttc

SEQ ID NO: 4322 - DNA, 25 bp, artificial sequence
  antisense probe sequence
gagacttcattggtgatacactcaa

SEQ ID NO: 4323 - DNA, 25 bp, artificial sequence
  antisense probe sequence
gtgatacactcaatttttactgggt

SEQ ID NO: 4324 - DNA, 25 bp, artificial sequence
  antisense probe sequence
gctaataatgttggtcactgtctca

SEQ ID NO: 4325 - DNA, 25 bp, artificial sequence
  antisense probe sequence
cacaaagcttttgggtaaccagcgt

SEQ ID NO: 4326 - DNA, 25 bp, artificial sequence
  antisense probe sequence
gggtaaccagcgttcttaaatgtat

SEQ ID NO: 4327 - DNA, 25 bp, artificial sequence
  antisense probe sequence
tatggtttttgaccaggtgaaccct

SEQ ID NO: 4328 - DNA, 25 bp, artificial sequence
  antisense probe sequence
gaccaggtgaaccctttagaagtga

SEQ ID NO: 4329 - DNA, 25 bp, artificial sequence
  antisense probe sequence
aaatacctttggctgtgatgaatgt

SEQ ID NO: 4330 - DNA, 25 bp, artificial sequence
  antisense probe sequence
tgaatgtagatcccagcagaatacc

SEQ ID NO: 4331 - DNA, 25 bp, artificial sequence
  antisense probe sequence
ttgactgagtatttgtagatgctta

SEQ ID NO: 4332 - DNA, 25 bp, artificial sequence
  antisense probe sequence
aagttctcaggtactgttcaattat

SEQ ID NO: 4333 - DNA, 25 bp, artificial sequence
  antisense probe sequence
atttttcttagctaaatctggcaac

SEQ ID NO: 4334 - DNA, 25 bp, artificial sequence
  antisense probe sequence
agcagaatctgccatatgagtaata

SEQ ID NO: 4335 - DNA, 25 bp, artificial sequence
  antisense probe sequence
gagtaatagaagtgagcaggcccag

SEQ ID NO: 4336 - DNA, 25 bp, artificial sequence
  antisense probe sequence
caggactccctaagtcaagaaacca

SEQ ID NO: 4337 - DNA, 25 bp, artificial sequence
  antisense probe sequence
agaaaccaagaggcgtcattacgga

SEQ ID NO: 4338 - DNA, 25 bp, artificial sequence
  antisense probe sequence
aaagagtaactcaccctgtgtgctc

SEQ ID NO: 4339 - DNA, 25 bp, artificial sequence
  antisense probe sequence
agcgatgcccccatgttatgaatgg

SEQ ID NO: 4340 - DNA, 25 bp, artificial sequence
  antisense probe sequence
ggaaaagttcactgaagggttcata

SEQ ID NO: 4341 - DNA, 25 bp, artificial sequence
  antisense probe sequence
ttggataccttcaagggatcagaaa

SEQ ID NO: 4342 - DNA, 25 bp, artificial sequence
  antisense probe sequence
tcatcattactctctacattattat

SEQ ID NO: 4343 - DNA, 25 bp, artificial sequence
  antisense probe sequence
ttttaacttgtctgcatgtttgaaa

SEQ ID NO: 4344 - DNA, 25 bp, artificial sequence
  antisense probe sequence
gcacgtccaaggtgatcctgagggc

SEQ ID NO: 4345 - DNA, 25 bp, artificial sequence
  antisense probe sequence
caccctgaagaaggctgtttccacc

SEQ ID NO: 4346 - DNA, 25 bp, artificial sequence
  antisense probe sequence
gacatggcccgaaatgcctatcact

SEQ ID NO: 4347 - DNA, 25 bp, artificial sequence
  antisense probe sequence
gcctatcacttcaagcgtgtgctca

SEQ ID NO: 4348 - DNA, 25 bp, artificial sequence
  antisense probe sequence
ctccaagtccaagctcaaggtcaag

SEQ ID NO: 4349 - DNA, 25 bp, artificial sequence
  antisense probe sequence
gacagcacaggtcactactgggctc

SEQ ID NO: 4350 - DNA, 25 bp, artificial sequence
  antisense probe sequence
tactgggctccaaacaggggcacaa

SEQ ID NO: 4351 - DNA, 25 bp, artificial sequence
  antisense probe sequence
caagcggcttatcaagggggttcga

SEQ ID NO: 4352 - DNA, 25 bp, artificial sequence
  antisense probe sequence
gggttcgaagggtggccaagtgcca

SEQ ID NO: 4353 - DNA, 25 bp, artificial sequence
  antisense probe sequence
atgaggcaggccaggcaagcagtca

SEQ ID NO: 4354 - DNA, 25 bp, artificial sequence
  antisense probe sequence
cgccattggctcagtgcagtgggaa

SEQ ID NO: 4355 - DNA, 25 bp, artificial sequence
  antisense probe sequence
cctcggctcctcatctgaagagaag

SEQ ID NO: 4356 - DNA, 25 bp, artificial sequence
  antisense probe sequence
taactgctaagttgctctggctcta

SEQ ID NO: 4357 - DNA, 25 bp, artificial sequence
  antisense probe sequence
ttgctctggctctaatgtttcatga

SEQ ID NO: 4358 - DNA, 25 bp, artificial sequence
  antisense probe sequence
tgccacatctggccataccaaatcc

SEQ ID NO: 4359 - DNA, 25 bp, artificial sequence
  antisense probe sequence
accaaatccatcgcatgcttcagga

SEQ ID NO: 4360 - DNA, 25 bp, artificial sequence
  antisense probe sequence
gaaagggaggggatgctgtgacagc

SEQ ID NO: 4361 - DNA, 25 bp, artificial sequence
  antisense probe sequence
gagaaagggcaagtccctcgtggtc

SEQ ID NO: 4362 - DNA, 25 bp, artificial sequence
  antisense probe sequence
cccaagcacctcgataaccagtggc

SEQ ID NO: 4363 - DNA, 25 bp, artificial sequence
  antisense probe sequence
ggcgcccagtgacagacaagacagc

SEQ ID NO: 4364 - DNA, 25 bp, artificial sequence
  antisense probe sequence
agctggggcagccctggctaaagga

SEQ ID NO: 4365 - DNA, 25 bp, artificial sequence
  antisense probe sequence
ctctgcctctgaatgcattccaaga

SEQ ID NO: 4366 - DNA, 25 bp, artificial sequence
  antisense probe sequence
acataccttgggttgatccacttag

SEQ ID NO: 4367 - DNA, 25 bp, artificial sequence
  antisense probe sequence
gatccacttaggaacctcagataat

SEQ ID NO: 4368 - DNA, 25 bp, artificial sequence
  antisense probe sequence
aacatctgccacgtatagagcaatt

SEQ ID NO: 4369 - DNA, 25 bp, artificial sequence
  antisense probe sequence
tatgtcccaggcactctactagaca

SEQ ID NO: 4370 - DNA, 25 bp, artificial sequence
  antisense probe sequence
ctactagacacttcatacagtttag

SEQ ID NO: 4371 - DNA, 25 bp, artificial sequence
  antisense probe sequence
gggtgtagatcaaggcaggagcagg

SEQ ID NO: 4372 - DNA, 25 bp, artificial sequence
  antisense probe sequence
gatgggggctattatgaactgagaa

SEQ ID NO: 4373 - DNA, 25 bp, artificial sequence
  antisense probe sequence
ttggggccaaatcatgtagactctt

SEQ ID NO: 4374 - DNA, 25 bp, artificial sequence
  antisense probe sequence
tagactcttgagtgatgtgttaagg

SEQ ID NO: 4375 - DNA, 25 bp, artificial sequence
  antisense probe sequence
ggaatgctatgagtgctgagagggc

SEQ ID NO: 4376 - DNA, 25 bp, artificial sequence
  antisense probe sequence
gcatcagaagtccttgagagcctcc

SEQ ID NO: 4377 - DNA, 25 bp, artificial sequence
  antisense probe sequence
atttcacggcaaagctttagaggtc

SEQ ID NO: 4378 - DNA, 25 bp, artificial sequence
  antisense probe sequence
tttagaggtctacactgctgcctac

SEQ ID NO: 4379 - DNA, 25 bp, artificial sequence
  antisense probe sequence
tacactgctgcctaccagaatatac

SEQ ID NO: 4380 - DNA, 25 bp, artificial sequence
  antisense probe sequence
aattctctgtatgcaccagattatt

SEQ ID NO: 4381 - DNA, 25 bp, artificial sequence
  antisense probe sequence
gcaaattcaaagtcacctcttcaga

SEQ ID NO: 4382 - DNA, 25 bp, artificial sequence
  antisense probe sequence
acctcttcagagatcactgtcagct

SEQ ID NO: 4383 - DNA, 25 bp, artificial sequence
  antisense probe sequence
actgtcagctaagtgtgtatctgga

SEQ ID NO: 4384 - DNA, 25 bp, artificial sequence
  antisense probe sequence
acaggtatccacttgtcgactaaga

SEQ ID NO: 4385 - DNA, 25 bp, artificial sequence
  antisense probe sequence
ttaagtaaactacacatttccattt

SEQ ID NO: 4386 - DNA, 25 bp, artificial sequence
  antisense probe sequence
gaactttatactcactttgctatgt

SEQ ID NO: 4387 - DNA, 25 bp, artificial sequence
  antisense probe sequence
aagcctcaaagtgaagtccaactgg

SEQ ID NO: 4388 - DNA, 25 bp, artificial sequence
  antisense probe sequence
ataccttcacaatctgaactttctc

SEQ ID NO: 4389 - DNA, 25 bp, artificial sequence
  antisense probe sequence
gaactttctctagatgggcacagat

SEQ ID NO: 4390 - DNA, 25 bp, artificial sequence
  antisense probe sequence
agtgctgaggctttttgcaggcgca

SEQ ID NO: 4391 - DNA, 25 bp, artificial sequence
  antisense probe sequence
tgcaggcgcagttagcaggcgaact

SEQ ID NO: 4392 - DNA, 25 bp, artificial sequence
  antisense probe sequence
ggcgaactggtcagcagggtttctg

SEQ ID NO: 4393 - DNA, 25 bp, artificial sequence
  antisense probe sequence
cgtagatttgcgtgacaggggccct

SEQ ID NO: 4394 - DNA, 25 bp, artificial sequence
  antisense probe sequence
caggggccctgtgttgctaaggaat

SEQ ID NO: 4395 - DNA, 25 bp, artificial sequence
  antisense probe sequence
aaaagtctcagcgtcagacactcct

SEQ ID NO: 4396 - DNA, 25 bp, artificial sequence
  antisense probe sequence
cctttccaggcaactcacagtttag

SEQ ID NO: 4397 - DNA, 25 bp, artificial sequence
  antisense probe sequence
gttgtgtgtgttcaagctcttgggt

SEQ ID NO: 4398 - DNA, 25 bp, artificial sequence
  antisense probe sequence
aacatcttgtcttacagctctttta

SEQ ID NO: 4399 - DNA, 25 bp, artificial sequence
  antisense probe sequence
ggaaatcaagatctgcgtgctgggt

SEQ ID NO: 4400 - DNA, 25 bp, artificial sequence
  antisense probe sequence
gcgtgctgggtatgttcattgctac

SEQ ID NO: 4401 - DNA, 25 bp, artificial sequence
  antisense probe sequence
tgcttctaggccttttcaactgaca

SEQ ID NO: 4402 - DNA, 25 bp, artificial sequence
  antisense probe sequence
aaaactcattgtaatcgtgtaactt

SEQ ID NO: 4403 - DNA, 25 bp, artificial sequence
  antisense probe sequence
actttgctagtaccccagaagctcc

SEQ ID NO: 4404 - DNA, 25 bp, artificial sequence
  antisense probe sequence
ttttaacgcttaatcaccttcatcc

SEQ ID NO: 4405 - DNA, 25 bp, artificial sequence
  antisense probe sequence
caccttcatcctcagttttatggta

SEQ ID NO: 4406 - DNA, 25 bp, artificial sequence
  antisense probe sequence
ttatggtaatcacttgtctttgcag

SEQ ID NO: 4407 - DNA, 25 bp, artificial sequence
  antisense probe sequence
gtctttgcagttttagtctgtaacc

SEQ ID NO: 4408 - DNA, 25 bp, artificial sequence
  antisense probe sequence
tagtctgtaaccatgcatccctaaa

SEQ ID NO: 4409 - DNA, 25 bp, artificial sequence
  antisense probe sequence
acttcttttatgtctgtgatgttca

SEQ ID NO: 4410 - DNA, 25 bp, artificial sequence
  antisense probe sequence
tgaggcagtgcatgttcttggccca

SEQ ID NO: 4411 - DNA, 25 bp, artificial sequence
  antisense probe sequence
tggcccagagtaagtgcttagtgaa

SEQ ID NO: 4412 - DNA, 25 bp, artificial sequence
  antisense probe sequence
agtgaatgctttctaactccgaacc

SEQ ID NO: 4413 - DNA, 25 bp, artificial sequence
  antisense probe sequence
gggtgttgagcaaaaggggccttca

SEQ ID NO: 4414 - DNA, 25 bp, artificial sequence
  antisense probe sequence
ggggccttcaagatgttcaaggcac

SEQ ID NO: 4415 - DNA, 25 bp, artificial sequence
  antisense probe sequence
ggcctcagtgggtgcatgtgattat

SEQ ID NO: 4416 - DNA, 25 bp, artificial sequence
  antisense probe sequence
tgattatccacgtttcacctatgaa

SEQ ID NO: 4417 - DNA, 25 bp, artificial sequence
  antisense probe sequence
gacagggcctcgattctgttttaaa

SEQ ID NO: 4418 - DNA, 25 bp, artificial sequence
  antisense probe sequence
tctgttttaaactccagtagtccct

SEQ ID NO: 4419 - DNA, 25 bp, artificial sequence
  antisense probe sequence
cctccattaccgtcactggtgaaat

SEQ ID NO: 4420 - DNA, 25 bp, artificial sequence
  antisense probe sequence
actggtgaaatgcggctcacctccc

SEQ ID NO: 4421 - DNA, 25 bp, artificial sequence
  antisense probe sequence
atgtcaggtttgtacctaccacatt

SEQ ID NO: 4422 - DNA, 25 bp, artificial sequence
  antisense probe sequence
ggcacatagtaagtagtcgataggt

SEQ ID NO: 4423 - DNA, 25 bp, artificial sequence
  antisense probe sequence
attgttattttctggagtccaacta

SEQ ID NO: 4424 - DNA, 25 bp, artificial sequence
  antisense probe sequence
gagtccaactaacaaatcccacagt

SEQ ID NO: 4425 - DNA, 25 bp, artificial sequence
  antisense probe sequence
aaatcccacagtgaatgacatcaca

SEQ ID NO: 4426 - DNA, 25 bp, artificial sequence
  antisense probe sequence
gggatgcaaccaacaagatccagaa

SEQ ID NO: 4427 - DNA, 25 bp, artificial sequence
  antisense probe sequence
acttctactagataaacaactccat

SEQ ID NO: 4428 - DNA, 25 bp, artificial sequence
  antisense probe sequence
gataaacaactccatttcttcagca

SEQ ID NO: 4429 - DNA, 25 bp, artificial sequence
  antisense probe sequence
gaaccaaatttgtatgaggcaatca

SEQ ID NO: 4430 - DNA, 25 bp, artificial sequence
  antisense probe sequence
aaaactgacaccgactgtattaagg

SEQ ID NO: 4431 - DNA, 25 bp, artificial sequence
  antisense probe sequence
atgagattgctgttatgttttctaa

SEQ ID NO: 4432 - DNA, 25 bp, artificial sequence
  antisense probe sequence
aactagatttttgaccctcactcat

SEQ ID NO: 4433 - DNA, 25 bp, artificial sequence
  antisense probe sequence
ctttccttgctatagacatgctttg

SEQ ID NO: 4434 - DNA, 25 bp, artificial sequence
  antisense probe sequence
agacatgctttgcatacccagcttc

SEQ ID NO: 4435 - DNA, 25 bp, artificial sequence
  antisense probe sequence
ttctagccacatcttccctaagaaa

SEQ ID NO: 4436 - DNA, 25 bp, artificial sequence
  antisense probe sequence
ggatctgcatgttgtcagctaccta

SEQ ID NO: 4437 - DNA, 25 bp, artificial sequence
  antisense probe sequence
gttgtcagctacctaaagcagcaaa

SEQ ID NO: 4438 - DNA, 25 bp, artificial sequence
  antisense probe sequence
taaaatcagggaaccttgcagttta

SEQ ID NO: 4439 - DNA, 25 bp, artificial sequence
  antisense probe sequence
aaccttgcagtttaaggcacacctt

SEQ ID NO: 4440 - DNA, 25 bp, artificial sequence
  antisense probe sequence
tttaatccttcaatgcatccagcca

SEQ ID NO: 4441 - DNA, 25 bp, artificial sequence
  antisense probe sequence
tccttcaatgcatccagccaaaaca

SEQ ID NO: 4442 - DNA, 25 bp, artificial sequence
  antisense probe sequence
taccatccatcaatgcaaggttttt

SEQ ID NO: 4443 - DNA, 25 bp, artificial sequence
  antisense probe sequence
gaaactcatgtgtcctcatggatcg

SEQ ID NO: 4444 - DNA, 25 bp, artificial sequence
  antisense probe sequence
catggatcgtggatgccttcatttc

SEQ ID NO: 4445 - DNA, 25 bp, artificial sequence
  antisense probe sequence
tcagtagagtgacccgcggatggca

SEQ ID NO: 4446 - DNA, 25 bp, artificial sequence
  antisense probe sequence
atggcataaatgcacctccttttct

SEQ ID NO: 4447 - DNA, 25 bp, artificial sequence
  antisense probe sequence
tcttggccttggatctatgggtctg

SEQ ID NO: 4448 - DNA, 25 bp, artificial sequence
  antisense probe sequence
ggattgtggtcatctcctcaatcct

SEQ ID NO: 4449 - DNA, 25 bp, artificial sequence
  antisense probe sequence
gctgaatcaatgtggccgtgggtgg

SEQ ID NO: 4450 - DNA, 25 bp, artificial sequence
  antisense probe sequence
ggccgtgggtgggaacttacataca

SEQ ID NO: 4451 - DNA, 25 bp, artificial sequence
  antisense probe sequence
gactgtctaaacaagggggcctcgc

SEQ ID NO: 4452 - DNA, 25 bp, artificial sequence
  antisense probe sequence
gggcctcgcatggagctgtaaagca

SEQ ID NO: 4453 - DNA, 25 bp, artificial sequence
  antisense probe sequence
gggatacatgggcagtgcttcagac

SEQ ID NO: 4454 - DNA, 25 bp, artificial sequence
  antisense probe sequence
tatttttaatgccttttcctgggat

SEQ ID NO: 4455 - DNA, 25 bp, artificial sequence
  antisense probe sequence
ttttaatgccttttcctgggataag

SEQ ID NO: 4456 - DNA, 25 bp, artificial sequence
  antisense probe sequence
ttaatgccttttcctgggataagca

SEQ ID NO: 4457 - DNA, 25 bp, artificial sequence
  antisense probe sequence
atgccttttcctgggataagcatta

SEQ ID NO: 4458 - DNA, 25 bp, artificial sequence
  antisense probe sequence
gccttttcctgggataagcattaaa

SEQ ID NO: 4459 - DNA, 25 bp, artificial sequence
  antisense probe sequence
gatagtgatggtaaggcaagattct

SEQ ID NO: 4460 - DNA, 25 bp, artificial sequence
  antisense probe sequence
gatggtaaggcaagattctagcaaa

SEQ ID NO: 4461 - DNA, 25 bp, artificial sequence
  antisense probe sequence
ggcaagattctagcaaagagagatg

SEQ ID NO: 4462 - DNA, 25 bp, artificial sequence
  antisense probe sequence
gagagatgggagataaatggctgag

SEQ ID NO: 4463 - DNA, 25 bp, artificial sequence
  antisense probe sequence
gggagataaatggctgagagttcag

SEQ ID NO: 4464 - DNA, 25 bp, artificial sequence
  antisense probe sequence
aatggctgagagttcaggtgaatat

SEQ ID NO: 4465 - DNA, 25 bp, artificial sequence
  antisense probe sequence
ggcagcagtggcatggacaagcaac

SEQ ID NO: 4466 - DNA, 25 bp, artificial sequence
  antisense probe sequence
agcaactgctaattcgagacttact

SEQ ID NO: 4467 - DNA, 25 bp, artificial sequence
  antisense probe sequence
cgagacttactattggcttcacagc

SEQ ID NO: 4468 - DNA, 25 bp, artificial sequence
  antisense probe sequence
cacagcacaccctacagtgagcagg

SEQ ID NO: 4469 - DNA, 25 bp, artificial sequence
  antisense probe sequence
atgagaccgtggaacagctacctgc

SEQ ID NO: 4470 - DNA, 25 bp, artificial sequence
  antisense probe sequence
ggaacagctacctgcttttggttaa

SEQ ID NO: 4471 - DNA, 25 bp, artificial sequence
  antisense probe sequence
atgaactcagcttgtttttcctaat

SEQ ID NO: 4472 - DNA, 25 bp, artificial sequence
  antisense probe sequence
aattagcacagtccctggatctcaa

SEQ ID NO: 4473 - DNA, 25 bp, artificial sequence
  antisense probe sequence
ttgattgatcaagagtgccacggaa

SEQ ID NO: 4474 - DNA, 25 bp, artificial sequence
  antisense probe sequence
gggtggaggagggtgtcacttcaga

SEQ ID NO: 4475 - DNA, 25 bp, artificial sequence
  antisense probe sequence
tgtcacttcagatggggcaggcaca

SEQ ID NO: 4476 - DNA, 25 bp, artificial sequence
  antisense probe sequence
taaagttgggcagtaatcttaatta

SEQ ID NO: 4477 - DNA, 25 bp, artificial sequence
  antisense probe sequence
tgttttacaactagaacctgcccta

SEQ ID NO: 4478 - DNA, 25 bp, artificial sequence
  antisense probe sequence
tagaacctgccctaaatgttgaata

SEQ ID NO: 4479 - DNA, 25 bp, artificial sequence
  antisense probe sequence
aatgttgaatatcttcctagcaaga

SEQ ID NO: 4480 - DNA, 25 bp, artificial sequence
  antisense probe sequence
cttcctagcaagaaacagtctgtca

SEQ ID NO: 4481 - DNA, 25 bp, artificial sequence
  antisense probe sequence
cagtctgtcattttacttacacgat

SEQ ID NO: 4482 - DNA, 25 bp, artificial sequence
  antisense probe sequence
acttacacgatgtctaaccaaacca

SEQ ID NO: 4483 - DNA, 25 bp, artificial sequence
  antisense probe sequence
gtctaaccaaaccataactttacat

SEQ ID NO: 4484 - DNA, 25 bp, artificial sequence
  antisense probe sequence
tacataaactagtcgtttcggtcaa

SEQ ID NO: 4485 - DNA, 25 bp, artificial sequence
  antisense probe sequence
gacccctgagtaccattaatattcc

SEQ ID NO: 4486 - DNA, 25 bp, artificial sequence
  antisense probe sequence
gagcagccattatgaaatctcacaa

SEQ ID NO: 4487 - DNA, 25 bp, artificial sequence
  antisense probe sequence
ttgcctgcggagcacgggtgggcat

SEQ ID NO: 4488 - DNA, 25 bp, artificial sequence
  antisense probe sequence
tgcctgcggagcacgggtgggcatt

SEQ ID NO: 4489 - DNA, 25 bp, artificial sequence
  antisense probe sequence
ctgcggagcacgggtgggcattgga

SEQ ID NO: 4490 - DNA, 25 bp, artificial sequence
  antisense probe sequence
ggagcacgggtgggcattggatgta

SEQ ID NO: 4491 - DNA, 25 bp, artificial sequence
  antisense probe sequence
gcacgggtgggcattggatgtaagg

SEQ ID NO: 4492 - DNA, 25 bp, artificial sequence
  antisense probe sequence
ggtgggcattggatgtaaggtattc

SEQ ID NO: 4493 - DNA, 25 bp, artificial sequence
  antisense probe sequence
tggatgtaaggtattcctaacttcc

SEQ ID NO: 4494 - DNA, 25 bp, artificial sequence
  antisense probe sequence
ggagacggcaggagcagctcaggta

SEQ ID NO: 4495 - DNA, 25 bp, artificial sequence
  antisense probe sequence
ggagcagctcaggtaaccaggggaa

SEQ ID NO: 4496 - DNA, 25 bp, artificial sequence
  antisense probe sequence
gcagctcaggtaaccaggggaagct

SEQ ID NO: 4497 - DNA, 25 bp, artificial sequence
  antisense probe sequence
ggtaaccaggggaagcttgcgtgcc

SEQ ID NO: 4498 - DNA, 25 bp, artificial sequence
  antisense probe sequence
attctgaagccagaccgtctttcct

SEQ ID NO: 4499 - DNA, 25 bp, artificial sequence
  antisense probe sequence
tcgcagctgggcgaggggacttgga

SEQ ID NO: 4500 - DNA, 25 bp, artificial sequence
  antisense probe sequence
ctgggcgaggggacttggaggacag

SEQ ID NO: 4501 - DNA, 25 bp, artificial sequence
  antisense probe sequence
ggggacttggaggacagggtgaagc

SEQ ID NO: 4502 - DNA, 25 bp, artificial sequence
  antisense probe sequence
acttggaggacagggtgaagctgca

SEQ ID NO: 4503 - DNA, 25 bp, artificial sequence
  antisense probe sequence
tgaagctgcagaagacctggggtgg

SEQ ID NO: 4504 - DNA, 25 bp, artificial sequence
  antisense probe sequence
gctgcagaagacctggggtgggatg

SEQ ID NO: 4505 - DNA, 25 bp, artificial sequence
  antisense probe sequence
tagagaggacgccaaggactgggga

SEQ ID NO: 4506 - DNA, 25 bp, artificial sequence
  antisense probe sequence
agaggacgccaaggactggggaagg

SEQ ID NO: 4507 - DNA, 25 bp, artificial sequence
  antisense probe sequence
ggaagttaggaataccttacatcca

SEQ ID NO: 4508 - DNA, 25 bp, artificial sequence
  antisense probe sequence
aggaataccttacatccaatgccca

SEQ ID NO: 4509 - DNA, 25 bp, artificial sequence
  antisense probe sequence
gaaatacacccactctcttggaata

SEQ ID NO: 4510 - DNA, 25 bp, artificial sequence
  antisense probe sequence
atgacgtaccactcagttggaccct

SEQ ID NO: 4511 - DNA, 25 bp, artificial sequence
  antisense probe sequence
gaccctcaagagtcactgctttgtc

SEQ ID NO: 4512 - DNA, 25 bp, artificial sequence
  antisense probe sequence
cgcacgcttccatttgatgcatttg

SEQ ID NO: 4513 - DNA, 25 bp, artificial sequence
  antisense probe sequence
atgtcattgtccttgagaccctaca

SEQ ID NO: 4514 - DNA, 25 bp, artificial sequence
  antisense probe sequence
gagaccctacatgtgcagtttggct

SEQ ID NO: 4515 - DNA, 25 bp, artificial sequence
  antisense probe sequence
tttcctgcaggcttttccatgagta

SEQ ID NO: 4516 - DNA, 25 bp, artificial sequence
  antisense probe sequence
gaacaaatctgtatggcttttcccc

SEQ ID NO: 4517 - DNA, 25 bp, artificial sequence
  antisense probe sequence
gtgaacttgtcctagtatgcttgcc

SEQ ID NO: 4518 - DNA, 25 bp, artificial sequence
  antisense probe sequence
cttgcctcacaaacgttttagccat

SEQ ID NO: 4519 - DNA, 25 bp, artificial sequence
  antisense probe sequence
cttagcctgacagtgtcctgttctc

SEQ ID NO: 4520 - DNA, 25 bp, artificial sequence
  antisense probe sequence
ttaatttctgtgaagagtgcccctg

SEQ ID NO: 4521 - DNA, 25 bp, artificial sequence
  antisense probe sequence
gtgtctggataacgcgtcagcttct

SEQ ID NO: 4522 - DNA, 25 bp, artificial sequence
  antisense probe sequence
gataacgcgtcagcttcttaaagta

SEQ ID NO: 4523 - DNA, 25 bp, artificial sequence
  antisense probe sequence
ttattctcttgctaaagttgtaatt

SEQ ID NO: 4524 - DNA, 25 bp, artificial sequence
  antisense probe sequence
agaattttccagctctaactgcctt

SEQ ID NO: 4525 - DNA, 25 bp, artificial sequence
  antisense probe sequence
cagctctaactgccttcttagtaca

SEQ ID NO: 4526 - DNA, 25 bp, artificial sequence
  antisense probe sequence
ctgccttcttagtacatgtctttct

SEQ ID NO: 4527 - DNA, 25 bp, artificial sequence
  antisense probe sequence
ttcttagtacatgtctttctgcctt

SEQ ID NO: 4528 - DNA, 25 bp, artificial sequence
  antisense probe sequence
ctttctgcctttgaagcatatgagt

SEQ ID NO: 4529 - DNA, 25 bp, artificial sequence
  antisense probe sequence
tgagtttgccaaagtcattctcccc

SEQ ID NO: 4530 - DNA, 25 bp, artificial sequence
  antisense probe sequence
cccctaatgacatattgtggactta

SEQ ID NO: 4531 - DNA, 25 bp, artificial sequence
  antisense probe sequence
cccagccgctataacttttaacaat

SEQ ID NO: 4532 - DNA, 25 bp, artificial sequence
  antisense probe sequence
acaattcccatatgtcctttattcc

SEQ ID NO: 4533 - DNA, 25 bp, artificial sequence
  antisense probe sequence
tatgtcctttattccactaagatga

SEQ ID NO: 4534 - DNA, 25 bp, artificial sequence
  antisense probe sequence
atgagtgcagtatatatttccatct

SEQ ID NO: 4535 - DNA, 25 bp, artificial sequence
  antisense probe sequence
atatttccatctgtccaaggcttcc

SEQ ID NO: 4536 - DNA, 25 bp, artificial sequence
  antisense probe sequence
gggcatttggggaatccaggctgtg

SEQ ID NO: 4537 - DNA, 25 bp, artificial sequence
  antisense probe sequence
ccaggctgtgattcagggaagttcc

SEQ ID NO: 4538 - DNA, 25 bp, artificial sequence
  antisense probe sequence
aagttccaagtgtctgatgaagtgt

SEQ ID NO: 4539 - DNA, 25 bp, artificial sequence
  antisense probe sequence
ttgttttacatctttgtgtcccttg

SEQ ID NO: 4540 - DNA, 25 bp, artificial sequence
  antisense probe sequence
ccttgcaggtctagcactgtgctat

SEQ ID NO: 4541 - DNA, 25 bp, artificial sequence
  antisense probe sequence
gtgctatgtaggtaacatgtgctcc

SEQ ID NO: 4542 - DNA, 25 bp, artificial sequence
  antisense probe sequence
agctgcgcaagatccaggcgcggat

SEQ ID NO: 4543 - DNA, 25 bp, artificial sequence
  antisense probe sequence
ttcgcgcaggctgacggctcggcct

SEQ ID NO: 4544 - DNA, 25 bp, artificial sequence
  antisense probe sequence
tcgcgcaggctgacggctcggccta

SEQ ID NO: 4545 - DNA, 25 bp, artificial sequence
  antisense probe sequence
caggctgacggctcggcctacattg

SEQ ID NO: 4546 - DNA, 25 bp, artificial sequence
  antisense probe sequence
gacggctcggcctacattgagcagg

SEQ ID NO: 4547 - DNA, 25 bp, artificial sequence
  antisense probe sequence
ctcggcctacattgagcagggcaac

SEQ ID NO: 4548 - DNA, 25 bp, artificial sequence
  antisense probe sequence
cctacattgagcagggcaacaccaa

SEQ ID NO: 4549 - DNA, 25 bp, artificial sequence
  antisense probe sequence
attgagcagggcaacaccaaggcac

SEQ ID NO: 4550 - DNA, 25 bp, artificial sequence
  antisense probe sequence
gagcagggcaacaccaaggcactgg

SEQ ID NO: 4551 - DNA, 25 bp, artificial sequence
  antisense probe sequence
agggcaacaccaaggcactggctgt

SEQ ID NO: 4552 - DNA, 25 bp, artificial sequence
  antisense probe sequence
caacaccaaggcactggctgtggtc

SEQ ID NO: 4553 - DNA, 25 bp, artificial sequence
  antisense probe sequence
acaccaaggcactggctgtggtcta

SEQ ID NO: 4554 - DNA, 25 bp, artificial sequence
  antisense probe sequence
caaggcactggctgtggtctacggc

SEQ ID NO: 4555 - DNA, 25 bp, artificial sequence
  antisense probe sequence
aggcactggctgtggtctacggccc

SEQ ID NO: 4556 - DNA, 25 bp, artificial sequence
  antisense probe sequence
gcactggctgtggtctacggcccgc

SEQ ID NO: 4557 - DNA, 25 bp, artificial sequence
  antisense probe sequence
actggctgtggtctacggcccgcac

SEQ ID NO: 4558 - DNA, 25 bp, artificial sequence
  antisense probe sequence
ccattctgagtacttctccgcaaac

SEQ ID NO: 4559 - DNA, 25 bp, artificial sequence
  antisense probe sequence
gactgttttacatgaagggtgcaaa

SEQ ID NO: 4560 - DNA, 25 bp, artificial sequence
  antisense probe sequence
gaaccctagggtgaaacacgtgaca

SEQ ID NO: 4561 - DNA, 25 bp, artificial sequence
  antisense probe sequence
tattgaatagtcctcttctctaccc

SEQ ID NO: 4562 - DNA, 25 bp, artificial sequence
  antisense probe sequence
aagagatgagcattcaagtcaggca

SEQ ID NO: 4563 - DNA, 25 bp, artificial sequence
  antisense probe sequence
tgaatttgggtcaaggctgcgccac

SEQ ID NO: 4564 - DNA, 25 bp, artificial sequence
  antisense probe sequence
aggctgcgccactcaaaagctatat

SEQ ID NO: 4565 - DNA, 25 bp, artificial sequence
  antisense probe sequence
atatgacctctatatgagcagctta

SEQ ID NO: 4566 - DNA, 25 bp, artificial sequence
  antisense probe sequence
tattcaacctcttttaacctccatt

SEQ ID NO: 4567 - DNA, 25 bp, artificial sequence
  antisense probe sequence
aacctccattttgtcatctgtagaa

SEQ ID NO: 4568 - DNA, 25 bp, artificial sequence
  antisense probe sequence
taaatgcctagctcagaaggattcc

SEQ ID NO: 4569 - DNA, 25 bp, artificial sequence
  antisense probe sequence
tcccccctggacaactgtataccca

SEQ ID NO: 4570 - DNA, 25 bp, artificial sequence
  antisense probe sequence
tgtatacccaagacagtccccaggg

SEQ ID NO: 4571 - DNA, 25 bp, artificial sequence
  antisense probe sequence
gtatacccaagacagtccccagggc

SEQ ID NO: 4572 - DNA, 25 bp, artificial sequence
  antisense probe sequence
atacccaagacagtccccagggcct

SEQ ID NO: 4573 - DNA, 25 bp, artificial sequence
  antisense probe sequence
taagcagtccagactccaaccccaa

SEQ ID NO: 4574 - DNA, 25 bp, artificial sequence
  antisense probe sequence
gggtccatcatcccctataccaggg

SEQ ID NO: 4575 - DNA, 25 bp, artificial sequence
  antisense probe sequence
gggctatcccctcaacttggagggc

SEQ ID NO: 4576 - DNA, 25 bp, artificial sequence
  antisense probe sequence
ggctatcccctcaacttggagggct

SEQ ID NO: 4577 - DNA, 25 bp, artificial sequence
  antisense probe sequence
gctatcccctcaacttggagggctg

SEQ ID NO: 4578 - DNA, 25 bp, artificial sequence
  antisense probe sequence
tatcccctcaacttggagggctggc

SEQ ID NO: 4579 - DNA, 25 bp, artificial sequence
  antisense probe sequence
ccctcaacttggagggctggccaaa

SEQ ID NO: 4580 - DNA, 25 bp, artificial sequence
  antisense probe sequence
catctaccctgataacaccacagat

SEQ ID NO: 4581 - DNA, 25 bp, artificial sequence
  antisense probe sequence
atccaggagagcagtatacatacat

SEQ ID NO: 4582 - DNA, 25 bp, artificial sequence
  antisense probe sequence
atacatacatgttgcttgccactga

SEQ ID NO: 4583 - DNA, 25 bp, artificial sequence
  antisense probe sequence
gtgactaggatttaccattcccaca

SEQ ID NO: 4584 - DNA, 25 bp, artificial sequence
  antisense probe sequence
cattcccacattgatgctccaaaag

SEQ ID NO: 4585 - DNA, 25 bp, artificial sequence
  antisense probe sequence
gatgctccaaaagatattgcctcag

SEQ ID NO: 4586 - DNA, 25 bp, artificial sequence
  antisense probe sequence
gatattgcctcaggactcatcggac

SEQ ID NO: 4587 - DNA, 25 bp, artificial sequence
  antisense probe sequence
ctcatcggacctttaataatctgta

SEQ ID NO: 4588 - DNA, 25 bp, artificial sequence
  antisense probe sequence
atgaaaatttcagctggtacctaga

SEQ ID NO: 4589 - DNA, 25 bp, artificial sequence
  antisense probe sequence
aaaacctactgctcagaaccagaga

SEQ ID NO: 4590 - DNA, 25 bp, artificial sequence
  antisense probe sequence
gatacacttttggaagtctcccagg

SEQ ID NO: 4591 - DNA, 25 bp, artificial sequence
  antisense probe sequence
ttttgcatgtctgacacccatgact

SEQ ID NO: 4592 - DNA, 25 bp, artificial sequence
  antisense probe sequence
acccagaagcaattcagcccaacag

SEQ ID NO: 4593 - DNA, 25 bp, artificial sequence
  antisense probe sequence
attcagcccaacaggaggacagctt

SEQ ID NO: 4594 - DNA, 25 bp, artificial sequence
  antisense probe sequence
gaggacagcttcaacccattacgat

SEQ ID NO: 4595 - DNA, 25 bp, artificial sequence
  antisense probe sequence
tcaacccattacgatttcatctctg

SEQ ID NO: 4596 - DNA, 25 bp, artificial sequence
  antisense probe sequence
attacgatttcatctctgccccaac

SEQ ID NO: 4597 - DNA, 25 bp, artificial sequence
  antisense probe sequence
agcagcaagcacctgttacctgtcc

SEQ ID NO: 4598 - DNA, 25 bp, artificial sequence
  antisense probe sequence
gcctttgaaaaatccctaacctatg

SEQ ID NO: 4599 - DNA, 25 bp, artificial sequence
  antisense probe sequence
aaatccctaacctatgagctttgaa

SEQ ID NO: 4600 - DNA, 25 bp, artificial sequence
  antisense probe sequence
ccctaacctatgagctttgaataag

SEQ ID NO: 4601 - DNA, 25 bp, artificial sequence
  antisense probe sequence
agatgagtacgaacttcatcgccca

SEQ ID NO: 4602 - DNA, 25 bp, artificial sequence
  antisense probe sequence
gcttcctttgagaacaagtttgagt

SEQ ID NO: 4603 - DNA, 25 bp, artificial sequence
  antisense probe sequence
aaagctgttttatttgattcactgt

SEQ ID NO: 4604 - DNA, 25 bp, artificial sequence
  antisense probe sequence
gctgttttatttgattcactgtgaa

SEQ ID NO: 4605 - DNA, 25 bp, artificial sequence
  antisense probe sequence
aaaagtgaaaacacagcacatttca

SEQ ID NO: 4606 - DNA, 25 bp, artificial sequence
  antisense probe sequence
gcacatttcaagtgtaatccccttt

SEQ ID NO: 4607 - DNA, 25 bp, artificial sequence
  antisense probe sequence
ttcaagtgtaatcccctttggaatt

SEQ ID NO: 4608 - DNA, 25 bp, artificial sequence
  antisense probe sequence
aagtcttagtatatgtctttgtgac

SEQ ID NO: 4609 - DNA, 25 bp, artificial sequence
  antisense probe sequence
gtctttgtgacagaaaaacatagat

SEQ ID NO: 4610 - DNA, 25 bp, artificial sequence
  antisense probe sequence
atgggacaggtaaatgaaatgttcc

SEQ ID NO: 4611 - DNA, 25 bp, artificial sequence
  antisense probe sequence
gaaatgttcctagttgcatagctgt

SEQ ID NO: 4612 - DNA, 25 bp, artificial sequence
  antisense probe sequence
gttcctagttgcatagctgttaacc

SEQ ID NO: 4613 - DNA, 25 bp, artificial sequence
  antisense probe sequence
attcctgggctcgagagagccactc

SEQ ID NO: 4614 - DNA, 25 bp, artificial sequence
  antisense probe sequence
gtgattttgccatattagtttacca

SEQ ID NO: 4615 - DNA, 25 bp, artificial sequence
  antisense probe sequence
tttgccatattagtttaccatctgt

SEQ ID NO: 4616 - DNA, 25 bp, artificial sequence
  antisense probe sequence
gtttaccatctgtacaattatttgc

SEQ ID NO: 4617 - DNA, 25 bp, artificial sequence
  antisense probe sequence
ccatctgtacaattatttgctttat

SEQ ID NO: 4618 - DNA, 25 bp, artificial sequence
  antisense probe sequence
ctttaaattggctcattattcactt

SEQ ID NO: 4619 - DNA, 25 bp, artificial sequence
  antisense probe sequence
aattggctcattattcacttaatga

SEQ ID NO: 4620 - DNA, 25 bp, artificial sequence
  antisense probe sequence
gaaattattgcaacaggaatctttt

SEQ ID NO: 4621 - DNA, 25 bp, artificial sequence
  antisense probe sequence
gcaacaggaatcttttgtatcactt

SEQ ID NO: 4622 - DNA, 25 bp, artificial sequence
  antisense probe sequence
gaatcttttgtatcacttctgtaaa

SEQ ID NO: 4623 - DNA, 25 bp, artificial sequence
  antisense probe sequence
gtctcatttgccatcaatagaaggt

SEQ ID NO: 4624 - DNA, 25 bp, artificial sequence
  antisense probe sequence
aaatgcagataaaggctacctctga

SEQ ID NO: 4625 - DNA, 25 bp, artificial sequence
  antisense probe sequence
taaaggctacctctgaattctcaat

SEQ ID NO: 4626 - DNA, 25 bp, artificial sequence
  antisense probe sequence
aaaggctacctctgaattctcaata

SEQ ID NO: 4627 - DNA, 25 bp, artificial sequence
  antisense probe sequence
aggctacctctgaattctcaataga

SEQ ID NO: 4628 - DNA, 25 bp, artificial sequence
  antisense probe sequence
gaattctcaatagattcatcatgtt

SEQ ID NO: 4629 - DNA, 25 bp, artificial sequence
  antisense probe sequence
aatagattcatcatgtttgctctta

SEQ ID NO: 4630 - DNA, 25 bp, artificial sequence
  antisense probe sequence
gattcatcatgtttgctcttaagtg

SEQ ID NO: 4631 - DNA, 25 bp, artificial sequence
  antisense probe sequence
tcatcatgtttgctcttaagtgtag

SEQ ID NO: 4632 - DNA, 25 bp, artificial sequence
  antisense probe sequence
gtttgctcttaagtgtagctgtcca

SEQ ID NO: 4633 - DNA, 25 bp, artificial sequence
  antisense probe sequence
tgctcttaagtgtagctgtccacac

SEQ ID NO: 4634 - DNA, 25 bp, artificial sequence
  antisense probe sequence
ctcttaagtgtagctgtccacactg

SEQ ID NO: 4635 - DNA, 25 bp, artificial sequence
  antisense probe sequence
atgttcactgtatgtgccaagccta

SEQ ID NO: 4636 - DNA, 25 bp, artificial sequence
  antisense probe sequence
actgtatgtgccaagcctaatatga

SEQ ID NO: 4637 - DNA, 25 bp, artificial sequence
  antisense probe sequence
gtgccaagcctaatatgagagctat

SEQ ID NO: 4638 - DNA, 25 bp, artificial sequence
  antisense probe sequence
ttatagagtttatgctacagcccta

SEQ ID NO: 4639 - DNA, 25 bp, artificial sequence
  antisense probe sequence
agagtttatgctacagccctacctt

SEQ ID NO: 4640 - DNA, 25 bp, artificial sequence
  antisense probe sequence
acagccctaccttcaggaaacttat

SEQ ID NO: 4641 - DNA, 25 bp, artificial sequence
  antisense probe sequence
aggaaacttatctactggacaaaca

SEQ ID NO: 4642 - DNA, 25 bp, artificial sequence
  antisense probe sequence
acattgtaattatctagcataggca

SEQ ID NO: 4643 - DNA, 25 bp, artificial sequence
  antisense probe sequence
gcataggcaaatatagacagtaaca

SEQ ID NO: 4644 - DNA, 25 bp, artificial sequence
  antisense probe sequence
aacagacaggtttacaattattaag

SEQ ID NO: 4645 - DNA, 25 bp, artificial sequence
  antisense probe sequence
caattattaagaaagggcagccagg

SEQ ID NO: 4646 - DNA, 25 bp, artificial sequence
  antisense probe sequence
taccatagcaagttcttatcctttg

SEQ ID NO: 4647 - DNA, 25 bp, artificial sequence
  antisense probe sequence
acctgtcacagtaatatgccaattt

SEQ ID NO: 4648 - DNA, 25 bp, artificial sequence
  antisense probe sequence
gccaatttttggtgtcgctttagta

SEQ ID NO: 4649 - DNA, 25 bp, artificial sequence
  antisense probe sequence
gtctttcctcagttgtctcctaaaa

SEQ ID NO: 4650 - DNA, 25 bp, artificial sequence
  antisense probe sequence
gatcgtcttgtgcagccctttaaaa

SEQ ID NO: 4651 - DNA, 25 bp, artificial sequence
  antisense probe sequence
atgcgttttgcattcatgtctttgc

SEQ ID NO: 4652 - DNA, 25 bp, artificial sequence
  antisense probe sequence
ctttcattttgggagtgactgtcat

SEQ ID NO: 4653 - DNA, 25 bp, artificial sequence
  antisense probe sequence
acaccagggccagattgcgtgggtt

SEQ ID NO: 4654 - DNA, 25 bp, artificial sequence
  antisense probe sequence
tgcgtgggttctagctagggaccta

SEQ ID NO: 4655 - DNA, 25 bp, artificial sequence
  antisense probe sequence
agctggttacttgatttctctctgt

SEQ ID NO: 4656 - DNA, 25 bp, artificial sequence
  antisense probe sequence
ttctctctgttccatttactatctg

SEQ ID NO: 4657 - DNA, 25 bp, artificial sequence
  antisense probe sequence
tgtgccttcattcatgggttaatgg

SEQ ID NO: 4658 - DNA, 25 bp, artificial sequence
  antisense probe sequence
aatgggttatcacaggaatgggact

SEQ ID NO: 4659 - DNA, 25 bp, artificial sequence
  antisense probe sequence
agagaactgagctagcatgcccagc

SEQ ID NO: 4660 - DNA, 25 bp, artificial sequence
  antisense probe sequence
cccacagagagcctccactagagtg

SEQ ID NO: 4661 - DNA, 25 bp, artificial sequence
  antisense probe sequence
gagcctccactagagtgatgctaag

SEQ ID NO: 4662 - DNA, 25 bp, artificial sequence
  antisense probe sequence
gtctagtgtctagtggatccaggcc

SEQ ID NO: 4663 - DNA, 25 bp, artificial sequence
  antisense probe sequence
ggatccaggccacaggagagagtgc

SEQ ID NO: 4664 - DNA, 25 bp, artificial sequence
  antisense probe sequence
aactgtggagtcagtggcagcatgc

SEQ ID NO: 4665 - DNA, 25 bp, artificial sequence
  antisense probe sequence
aaagctttaggcaccagcctgcaac

SEQ ID NO: 4666 - DNA, 25 bp, artificial sequence
  antisense probe sequence
cgagcagccacgtaggctgcaccca

SEQ ID NO: 4667 - DNA, 25 bp, artificial sequence
  antisense probe sequence
ccttcccaggctgatctgaggtaaa

SEQ ID NO: 4668 - DNA, 25 bp, artificial sequence
  antisense probe sequence
aaagcctgagacagctgccttgtgt

SEQ ID NO: 4669 - DNA, 25 bp, artificial sequence
  antisense probe sequence
cgactgagatgcacagctgccttgt

SEQ ID NO: 4670 - DNA, 25 bp, artificial sequence
  antisense probe sequence
gctgccttgtgtgcgactgagatgc

SEQ ID NO: 4671 - DNA, 25 bp, artificial sequence
  antisense probe sequence
tgagatgcaggatttcctcacgcct

SEQ ID NO: 4672 - DNA, 25 bp, artificial sequence
  antisense probe sequence
atgtgtcttaggggactctggcttc

SEQ ID NO: 4673 - DNA, 25 bp, artificial sequence
  antisense probe sequence
ggcttctctttttgcaagggcctct

SEQ ID NO: 4674 - DNA, 25 bp, artificial sequence
  antisense probe sequence
tctgtctgtgtccctgttagcacaa

SEQ ID NO: 4675 - DNA, 25 bp, artificial sequence
  antisense probe sequence
agagaaacagtccacctctgtgtct

SEQ ID NO: 4676 - DNA, 25 bp, artificial sequence
  antisense probe sequence
tgggcagagtgcggcagctcatgcc

SEQ ID NO: 4677 - DNA, 25 bp, artificial sequence
  antisense probe sequence
gtgagccaggattgtgcgactgcac

SEQ ID NO: 4678 - DNA, 25 bp, artificial sequence
  antisense probe sequence
gggtgacagggtgaaacgccatctc

SEQ ID NO: 4679 - DNA, 25 bp, artificial sequence
  antisense probe sequence
atactgaggtggatccctgcatcct

SEQ ID NO: 4680 - DNA, 25 bp, artificial sequence
  antisense probe sequence
ccctgcatcctcaacaacaatgtgc

SEQ ID NO: 4681 - DNA, 25 bp, artificial sequence
  antisense probe sequence
gaagcagctttacctacttgtttct

SEQ ID NO: 4682 - DNA, 25 bp, artificial sequence
  antisense probe sequence
cttagcctctgacttcctaatgtag

SEQ ID NO: 4683 - DNA, 25 bp, artificial sequence
  antisense probe sequence
ggaggtggtcagcaggcaatctcct

SEQ ID NO: 4684 - DNA, 25 bp, artificial sequence
  antisense probe sequence
ggcaatctcctgggccttaaaggat

SEQ ID NO: 4685 - DNA, 25 bp, artificial sequence
  antisense probe sequence
aaaggatgcggactcatcctcagcc

SEQ ID NO: 4686 - DNA, 25 bp, artificial sequence
  antisense probe sequence
ccagcgcccatgttgtgatacaggg

SEQ ID NO: 4687 - DNA, 25 bp, artificial sequence
  antisense probe sequence
gaaaaactcaggcccatccattttc

SEQ ID NO: 4688 - DNA, 25 bp, artificial sequence
  antisense probe sequence
aattgaggccttttcgatagtttcg

SEQ ID NO: 4689 - DNA, 25 bp, artificial sequence
  antisense probe sequence
aaatggcctcctggcgtaagctttt

SEQ ID NO: 4690 - DNA, 25 bp, artificial sequence
  antisense probe sequence
gtgttctcctactgcaaatattttc

SEQ ID NO: 4691 - DNA, 25 bp, artificial sequence
  antisense probe sequence
ggttttctcttcatgtaagtccttg

SEQ ID NO: 4692 - DNA, 25 bp, artificial sequence
  antisense probe sequence
tgttcttagcactttaattcctgtc

SEQ ID NO: 4693 - DNA, 25 bp, artificial sequence
  antisense probe sequence
gctgaaactggtctactgtgtctct

SEQ ID NO: 4694 - DNA, 25 bp, artificial sequence
  antisense probe sequence
gaaagggttgctgctgtcagccttg

SEQ ID NO: 4695 - DNA, 25 bp, artificial sequence
  antisense probe sequence
caaccctgtgatcagaacctccaaa

SEQ ID NO: 4696 - DNA, 25 bp, artificial sequence
  antisense probe sequence
agatagggatattggcccctcactg

SEQ ID NO: 4697 - DNA, 25 bp, artificial sequence
  antisense probe sequence
cactctcagccatagcactttgttc

SEQ ID NO: 4698 - DNA, 25 bp, artificial sequence
  antisense probe sequence
actttgttcactgtcctgtgtcaga

SEQ ID NO: 4699 - DNA, 25 bp, artificial sequence
  antisense probe sequence
tgtgtcagagcactgagctccaccc

SEQ ID NO: 4700 - DNA, 25 bp, artificial sequence
  antisense probe sequence
agctccacccttttctgagagttat

SEQ ID NO: 4701 - DNA, 25 bp, artificial sequence
  antisense probe sequence
tttataattctactttgagtgctgt

SEQ ID NO: 4702 - DNA, 25 bp, artificial sequence
  antisense probe sequence
gctgtctccatgtttgatgtatctg

SEQ ID NO: 4703 - DNA, 25 bp, artificial sequence
  antisense probe sequence
gtatctgagcaggttgctccacagg

SEQ ID NO: 4704 - DNA, 25 bp, artificial sequence
  antisense probe sequence
gagaattctcttatccaacatcaac

SEQ ID NO: 4705 - DNA, 25 bp, artificial sequence
  antisense probe sequence
ttctcttatccaacatcaacatctt

SEQ ID NO: 4706 - DNA, 25 bp, artificial sequence
  antisense probe sequence
catcttggtcagatttgaactcttc

SEQ ID NO: 4707 - DNA, 25 bp, artificial sequence
  antisense probe sequence
actcttcaatctcttgcactcaaag

SEQ ID NO: 4708 - DNA, 25 bp, artificial sequence
  antisense probe sequence
aatctcttgcactcaaagcttgtta

SEQ ID NO: 4709 - DNA, 25 bp, artificial sequence
  antisense probe sequence
aacttccaatttacatactctgctt

SEQ ID NO: 4710 - DNA, 25 bp, artificial sequence
  antisense probe sequence
gattcatatttacttcttatacatt

SEQ ID NO: 4711 - DNA, 25 bp, artificial sequence
  antisense probe sequence
ggcatggttgtggttaatctggttt

SEQ ID NO: 4712 - DNA, 25 bp, artificial sequence
  antisense probe sequence
gatctggtgcggaacctgcaaagtg

SEQ ID NO: 4713 - DNA, 25 bp, artificial sequence
  antisense probe sequence
cccagaatgtggagcggatcctggc

SEQ ID NO: 4714 - DNA, 25 bp, artificial sequence
  antisense probe sequence
gaaaacttggaacatctccgcaaca

SEQ ID NO: 4715 - DNA, 25 bp, artificial sequence
  antisense probe sequence
gaacatctccgcaacaagacagagg

SEQ ID NO: 4716 - DNA, 25 bp, artificial sequence
  antisense probe sequence
gaggatctggaagccacatctgagc

SEQ ID NO: 4717 - DNA, 25 bp, artificial sequence
  antisense probe sequence
aagccacatctgagcacttcaagac

SEQ ID NO: 4718 - DNA, 25 bp, artificial sequence
  antisense probe sequence
gagcacttcaagacgacatcgcaga

SEQ ID NO: 4719 - DNA, 25 bp, artificial sequence
  antisense probe sequence
gacgacatcgcagaaggtggctcga

SEQ ID NO: 4720 - DNA, 25 bp, artificial sequence
  antisense probe sequence
aaggtggctcgaaaattctggtgga

SEQ ID NO: 4721 - DNA, 25 bp, artificial sequence
  antisense probe sequence
gatgattgtccttatctgcgtgatt

SEQ ID NO: 4722 - DNA, 25 bp, artificial sequence
  antisense probe sequence
ccactggtgccttctcttaaagtaa

SEQ ID NO: 4723 - DNA, 25 bp, artificial sequence
  antisense probe sequence
ctctacctcatatcagtttgctagc

SEQ ID NO: 4724 - DNA, 25 bp, artificial sequence
  antisense probe sequence
aagactgtcagcttccaaacattaa

SEQ ID NO: 4725 - DNA, 25 bp, artificial sequence
  antisense probe sequence
atgcaatggttaacatcttctgtct

SEQ ID NO: 4726 - DNA, 25 bp, artificial sequence
  antisense probe sequence
tctgtctttataatctactccttgt

SEQ ID NO: 4727 - DNA, 25 bp, artificial sequence
  antisense probe sequence
taatctactccttgtaaagactgta

SEQ ID NO: 4728 - DNA, 25 bp, artificial sequence
  antisense probe sequence
agaaagcgcaacaatccatctctca

SEQ ID NO: 4729 - DNA, 25 bp, artificial sequence
  antisense probe sequence
atccatctctcaagtagtgtatcac

SEQ ID NO: 4730 - DNA, 25 bp, artificial sequence
  antisense probe sequence
agtgtatcacagtagtagcctccag

SEQ ID NO: 4731 - DNA, 25 bp, artificial sequence
  antisense probe sequence
tcacagtagtagcctccaggtttcc

SEQ ID NO: 4732 - DNA, 25 bp, artificial sequence
  antisense probe sequence
gaggcaccactaaaagatcgcagtt

SEQ ID NO: 4733 - DNA, 25 bp, artificial sequence
  antisense probe sequence
atcgcagtttgcctggtgcagtggc

SEQ ID NO: 4734 - DNA, 25 bp, artificial sequence
  antisense probe sequence
gattatcaattaccacaccatctcc

SEQ ID NO: 4735 - DNA, 25 bp, artificial sequence
  antisense probe sequence
gaagcatgattggtgcccagttagc

SEQ ID NO: 4736 - DNA, 25 bp, artificial sequence
  antisense probe sequence
cccagttagcctctgcaggatgtgg

SEQ ID NO: 4737 - DNA, 25 bp, artificial sequence
  antisense probe sequence
gtaggagaggttgtctgtggccaga

SEQ ID NO: 4738 - DNA, 25 bp, artificial sequence
  antisense probe sequence
acctatactcactttcccaaattga

SEQ ID NO: 4739 - DNA, 25 bp, artificial sequence
  antisense probe sequence
ttgaatcactgctcacactgctgat

SEQ ID NO: 4740 - DNA, 25 bp, artificial sequence
  antisense probe sequence
tagagtgctgtccggtggagatccc

SEQ ID NO: 4741 - DNA, 25 bp, artificial sequence
  antisense probe sequence
ccacccgaacgtcttatctaatcat

SEQ ID NO: 4742 - DNA, 25 bp, artificial sequence
  antisense probe sequence
atcatgaaactccctagttccttca

SEQ ID NO: 4743 - DNA, 25 bp, artificial sequence
  antisense probe sequence
gttccttcatgtaacttccctgaaa

SEQ ID NO: 4744 - DNA, 25 bp, artificial sequence
  antisense probe sequence
tttgagagtctgtgacccacttacc

SEQ ID NO: 4745 - DNA, 25 bp, artificial sequence
  antisense probe sequence
aattgtcggattttccatgtcctcc

SEQ ID NO: 4746 - DNA, 25 bp, artificial sequence
  antisense probe sequence
aacctcccagtgaaagggcagcctt

SEQ ID NO: 4747 - DNA, 25 bp, artificial sequence
  antisense probe sequence
gaaagggcagccttcattttgagaa

SEQ ID NO: 4748 - DNA, 25 bp, artificial sequence
  antisense probe sequence
gggagacagctcatccaatctccca

SEQ ID NO: 4749 - DNA, 25 bp, artificial sequence
  antisense probe sequence
caatctcccaagtctcatggtggat

SEQ ID NO: 4750 - DNA, 25 bp, artificial sequence
  antisense probe sequence
gtgactgtgagagtttccggtttaa

SEQ ID NO: 4751 - DNA, 25 bp, artificial sequence
  antisense probe sequence
aagccagatatgcctgtttcctttt

SEQ ID NO: 4752 - DNA, 25 bp, artificial sequence
  antisense probe sequence
gtggaggggacagtcagacccagag

SEQ ID NO: 4753 - DNA, 25 bp, artificial sequence
  antisense probe sequence
gacccagaggtcctttacgtgtgga

SEQ ID NO: 4754 - DNA, 25 bp, artificial sequence
  antisense probe sequence
aggagaggaccaggggacgtggctt

SEQ ID NO: 4755 - DNA, 25 bp, artificial sequence
  antisense probe sequence
aacaataggcttgaatctccaattc

SEQ ID NO: 4756 - DNA, 25 bp, artificial sequence
  antisense probe sequence
aacttaagatggacacagctgactg

SEQ ID NO: 4757 - DNA, 25 bp, artificial sequence
  antisense probe sequence
agatggacacagctgactggacccc

SEQ ID NO: 4758 - DNA, 25 bp, artificial sequence
  antisense probe sequence
cacttctatgtctctggaccacagg

SEQ ID NO: 4759 - DNA, 25 bp, artificial sequence
  antisense probe sequence
ggcaagtgggctgatggggtccgcc

SEQ ID NO: 4760 - DNA, 25 bp, artificial sequence
  antisense probe sequence
gtctcctggacaaggagtttccagc

SEQ ID NO: 4761 - DNA, 25 bp, artificial sequence
  antisense probe sequence
cctggacaaggagtttccagctgct

SEQ ID NO: 4762 - DNA, 25 bp, artificial sequence
  antisense probe sequence
ggctggagtctcaggccaaattgca

SEQ ID NO: 4763 - DNA, 25 bp, artificial sequence
  antisense probe sequence
aggccaaattgcagagggtcctcca

SEQ ID NO: 4764 - DNA, 25 bp, artificial sequence
  antisense probe sequence
cagggtcctgaagagcactggacta

SEQ ID NO: 4765 - DNA, 25 bp, artificial sequence
  antisense probe sequence
cctgaagagcactggactaagagtc

SEQ ID NO: 4766 - DNA, 25 bp, artificial sequence
  antisense probe sequence
actaagagtctagtggttccagggc

SEQ ID NO: 4767 - DNA, 25 bp, artificial sequence
  antisense probe sequence
ttctggctggaacggacgatgcccc

SEQ ID NO: 4768 - DNA, 25 bp, artificial sequence
  antisense probe sequence
ggatcttgttactgaataccacggg

SEQ ID NO: 4769 - DNA, 25 bp, artificial sequence
  antisense probe sequence
ggtgtgtctaagggactggctgaga

SEQ ID NO: 4770 - DNA, 25 bp, artificial sequence
  antisense probe sequence
actacagtgaacgactctgcctcgt

SEQ ID NO: 4771 - DNA, 25 bp, artificial sequence
  antisense probe sequence
gactctgcctcgtcagtgagattcc

SEQ ID NO: 4772 - DNA, 25 bp, artificial sequence
  antisense probe sequence
gttacaccctaaagcctgaaacctg

SEQ ID NO: 4773 - DNA, 25 bp, artificial sequence
  antisense probe sequence
aaccccaatcctctgacagaagaac

SEQ ID NO: 4774 - DNA, 25 bp, artificial sequence
  antisense probe sequence
ggtcctgtagccctaagtggtacta

SEQ ID NO: 4775 - DNA, 25 bp, artificial sequence
  antisense probe sequence
gtggtactaactttccttcattcaa

SEQ ID NO: 4776 - DNA, 25 bp, artificial sequence
  antisense probe sequence
ggctgatttggaattttgtgccccc

SEQ ID NO: 4777 - DNA, 25 bp, artificial sequence
  antisense probe sequence
aattttgtgcccccatgtaagcacc

SEQ ID NO: 4778 - DNA, 25 bp, artificial sequence
  antisense probe sequence
gcaaacatccggaagtatcccacca

SEQ ID NO: 4779 - DNA, 25 bp, artificial sequence
  antisense probe sequence
tatcccaccaagaaacaacagctcc

SEQ ID NO: 4780 - DNA, 25 bp, artificial sequence
  antisense probe sequence
tatttccagttacttgcctgcattc

SEQ ID NO: 4781 - DNA, 25 bp, artificial sequence
  antisense probe sequence
taataggtttgcccttgcatctcat

SEQ ID NO: 4782 - DNA, 25 bp, artificial sequence
  antisense probe sequence
gggactgtggtccattgtacaagcc

SEQ ID NO: 4783 - DNA, 25 bp, artificial sequence
  antisense probe sequence
gaatttgggtacatggactacgccc

SEQ ID NO: 4784 - DNA, 25 bp, artificial sequence
  antisense probe sequence
ggactacgcccaagcaaggtttgat

SEQ ID NO: 4785 - DNA, 25 bp, artificial sequence
  antisense probe sequence
gaagcttggggtgtgactgtgggga

SEQ ID NO: 4786 - DNA, 25 bp, artificial sequence
  antisense probe sequence
acctcatcactggactgcatgggga

SEQ ID NO: 4787 - DNA, 25 bp, artificial sequence
  antisense probe sequence
gtggcaggaggctttgggtggctca

SEQ ID NO: 4788 - DNA, 25 bp, artificial sequence
  antisense probe sequence
tttgggtggctcactactgaacaca

SEQ ID NO: 4789 - DNA, 25 bp, artificial sequence
  antisense probe sequence
acagccacgaagatcctaccaaaat

SEQ ID NO: 4790 - DNA, 25 bp, artificial sequence
  antisense probe sequence
ccaaaatgaagcgcttcctcttcct

SEQ ID NO: 4791 - DNA, 25 bp, artificial sequence
  antisense probe sequence
catcagcctcctggttatggtacag

SEQ ID NO: 4792 - DNA, 25 bp, artificial sequence
  antisense probe sequence
ggtacagatacaaactggactctca

SEQ ID NO: 4793 - DNA, 25 bp, artificial sequence
  antisense probe sequence
gactctcaggacaaaacgacaccag

SEQ ID NO: 4794 - DNA, 25 bp, artificial sequence
  antisense probe sequence
gcatccagcagcatgagcggaggca

SEQ ID NO: 4795 - DNA, 25 bp, artificial sequence
  antisense probe sequence
gtggccaatgccataatccacctct

SEQ ID NO: 4796 - DNA, 25 bp, artificial sequence
  antisense probe sequence
agttgaggtgacacgtctcagcctt

SEQ ID NO: 4797 - DNA, 25 bp, artificial sequence
  antisense probe sequence
gccaccatcactcgcaagagaatcc

SEQ ID NO: 4798 - DNA, 25 bp, artificial sequence
  antisense probe sequence
ttgggaggggttgatgccagacatc

SEQ ID NO: 4799 - DNA, 25 bp, artificial sequence
  antisense probe sequence
gggggtaatgatgtaggggccaagc

SEQ ID NO: 4800 - DNA, 25 bp, artificial sequence
  antisense probe sequence
caccagcaaggacggccaggacggt

SEQ ID NO: 4801 - DNA, 25 bp, artificial sequence
  antisense probe sequence
agcctgccaaggagccgtgttagga

SEQ ID NO: 4802 - DNA, 25 bp, artificial sequence
  antisense probe sequence
gaaatcaggctctcgaagctcataa

SEQ ID NO: 4803 - DNA, 25 bp, artificial sequence
  antisense probe sequence
gaagcaagtgacaaggacgcccgaa

SEQ ID NO: 4804 - DNA, 25 bp, artificial sequence
  antisense probe sequence
gacgcccgaagcacagtggacggtc

SEQ ID NO: 4805 - DNA, 25 bp, artificial sequence
  antisense probe sequence
ggacggtcatgaaggagcgggggtg

SEQ ID NO: 4806 - DNA, 25 bp, artificial sequence
  antisense probe sequence
gtccaggagagggagcgcccctggc

SEQ ID NO: 4807 - DNA, 25 bp, artificial sequence
  antisense probe sequence
ggctgtcgcctgacagcatacctca

SEQ ID NO: 4808 - DNA, 25 bp, artificial sequence
  antisense probe sequence
gcatacctcaaaaggccctagctaa

SEQ ID NO: 4809 - DNA, 25 bp, artificial sequence
  antisense probe sequence
ggttgtgtacaactccacgaggtga

SEQ ID NO: 4810 - DNA, 25 bp, artificial sequence
  antisense probe sequence
taaagactatgatctcatcccaata

SEQ ID NO: 4811 - DNA, 25 bp, artificial sequence
  antisense probe sequence
gatttacaaaggtcctcccattgca

SEQ ID NO: 4812 - DNA, 25 bp, artificial sequence
  antisense probe sequence
tttctagttcattttgtgtttccaa

SEQ ID NO: 4813 - DNA, 25 bp, artificial sequence
  antisense probe sequence
ggatgtgagactgaggtgccttttg

SEQ ID NO: 4814 - DNA, 25 bp, artificial sequence
  antisense probe sequence
ggtgccttttggtactgaaattctt

SEQ ID NO: 4815 - DNA, 25 bp, artificial sequence
  antisense probe sequence
gaaattctttttccatgtacctgaa

SEQ ID NO: 4816 - DNA, 25 bp, artificial sequence
  antisense probe sequence
tatactttattggtccctaggcttc

SEQ ID NO: 4817 - DNA, 25 bp, artificial sequence
  antisense probe sequence
aggcttcctattttgttaccttgct

SEQ ID NO: 4818 - DNA, 25 bp, artificial sequence
  antisense probe sequence
ttaccttgctttctctatggcatcc

SEQ ID NO: 4819 - DNA, 25 bp, artificial sequence
  antisense probe sequence
tggcatccaccattttgattgttct

SEQ ID NO: 4820 - DNA, 25 bp, artificial sequence
  antisense probe sequence
gtattctcgttacttttgctcttaa

SEQ ID NO: 4821 - DNA, 25 bp, artificial sequence
  antisense probe sequence
gtagaatcctctgttcataatgaac

SEQ ID NO: 4822 - DNA, 25 bp, artificial sequence
  antisense probe sequence
agatccgagtgcactcgcgaggcaa

SEQ ID NO: 4823 - DNA, 25 bp, artificial sequence
  antisense probe sequence
ccaccggtcacttcatgggcaagaa

SEQ ID NO: 4824 - DNA, 25 bp, artificial sequence
  antisense probe sequence
gggaccagcgactgcagctgagtca

SEQ ID NO: 4825 - DNA, 25 bp, artificial sequence
  antisense probe sequence
gagtcatgatctgctcggaatcctc

SEQ ID NO: 4826 - DNA, 25 bp, artificial sequence
  antisense probe sequence
tgctcggaatcctcctgctaaagaa

SEQ ID NO: 4827 - DNA, 25 bp, artificial sequence
  antisense probe sequence
gcaccccaaatccagtacaggaggc

SEQ ID NO: 4828 - DNA, 25 bp, artificial sequence
  antisense probe sequence
taggggcagacacaacagcgtggct

SEQ ID NO: 4829 - DNA, 25 bp, artificial sequence
  antisense probe sequence
agcgtggcttagattgtgcccaccc

SEQ ID NO: 4830 - DNA, 25 bp, artificial sequence
  antisense probe sequence
gtgcccacccagggaaggtgctgaa

SEQ ID NO: 4831 - DNA, 25 bp, artificial sequence
  antisense probe sequence
tgaatgggaccctgttgatggcccc

SEQ ID NO: 4832 - DNA, 25 bp, artificial sequence
  antisense probe sequence
aatctctgttactccattactgtga

SEQ ID NO: 4833 - DNA, 25 bp, artificial sequence
  antisense probe sequence
cagcccctgaagaaaattcacgtga

SEQ ID NO: 4834 - DNA, 25 bp, artificial sequence
  antisense probe sequence
gatgatgatacattccaagtcttca

SEQ ID NO: 4835 - DNA, 25 bp, artificial sequence
  antisense probe sequence
gacaaactttgcaggacttccctta

SEQ ID NO: 4836 - DNA, 25 bp, artificial sequence
  antisense probe sequence
gcaggacttcccttataaagcaaaa

SEQ ID NO: 4837 - DNA, 25 bp, artificial sequence
  antisense probe sequence
gttcagcttccaattagtattcttt

SEQ ID NO: 4838 - DNA, 25 bp, artificial sequence
  antisense probe sequence
tatatttctttcattgggcgctttc

SEQ ID NO: 4839 - DNA, 25 bp, artificial sequence
  antisense probe sequence
ctttcccatctccaactcggaagta

SEQ ID NO: 4840 - DNA, 25 bp, artificial sequence
  antisense probe sequence
gaagtaagcccaagagaacaacata

SEQ ID NO: 4841 - DNA, 25 bp, artificial sequence
  antisense probe sequence
gaatacaccaaaaggaggcgctctt

SEQ ID NO: 4842 - DNA, 25 bp, artificial sequence
  antisense probe sequence
aaatccaaatttctctcaatgttag

SEQ ID NO: 4843 - DNA, 25 bp, artificial sequence
  antisense probe sequence
gatttaattccctcaataacaccaa

SEQ ID NO: 4844 - DNA, 25 bp, artificial sequence
  antisense probe sequence
ggaactctaaaccttgtgatgacta

SEQ ID NO: 4845 - DNA, 25 bp, artificial sequence
  antisense probe sequence
atcactttaagttttgacacctaga

SEQ ID NO: 4846 - DNA, 25 bp, artificial sequence
  antisense probe sequence
gtcttagtaatagcatccactggaa

SEQ ID NO: 4847 - DNA, 25 bp, artificial sequence
  antisense probe sequence
tcagcatttaacttacatttgtact

SEQ ID NO: 4848 - DNA, 25 bp, artificial sequence
  antisense probe sequence
tttatatagtctacagttgtcctga

SEQ ID NO: 4849 - DNA, 25 bp, artificial sequence
  antisense probe sequence
agttgtcctgatttcttattgaatt

SEQ ID NO: 4850 - DNA, 25 bp, artificial sequence
  antisense probe sequence
gaatttgttagactagttctcttgt

SEQ ID NO: 4851 - DNA, 25 bp, artificial sequence
  antisense probe sequence
gttctcttgtcttgtgatctgtgta

SEQ ID NO: 4852 - DNA, 25 bp, artificial sequence
  antisense probe sequence
tttagtcactaagactttcctccaa

SEQ ID NO: 4853 - DNA, 25 bp, artificial sequence
  antisense probe sequence
tttcctccaagaactaagccaactt

SEQ ID NO: 4854 - DNA, 25 bp, artificial sequence
  antisense probe sequence
acggctgtatataatggtgatgtca

SEQ ID NO: 4855 - DNA, 25 bp, artificial sequence
  antisense probe sequence
ttcctgttctcttgtatagctgaaa

SEQ ID NO: 4856 - DNA, 25 bp, artificial sequence
  antisense probe sequence
gttctcttgtatagctgaaattcca

SEQ ID NO: 4857 - DNA, 25 bp, artificial sequence
  antisense probe sequence
gaaattccagtttaggagctcagtt

SEQ ID NO: 4858 - DNA, 25 bp, artificial sequence
  antisense probe sequence
gagaaacagttccattcaactggaa

SEQ ID NO: 4859 - DNA, 25 bp, artificial sequence
  antisense probe sequence
tgaaaaacctgatgcagtgctccat

SEQ ID NO: 4860 - DNA, 25 bp, artificial sequence
  antisense probe sequence
gggacagtttgtaacttgggctgta

SEQ ID NO: 4861 - DNA, 25 bp, artificial sequence
  antisense probe sequence
taactcccatatctcctttaatgac

SEQ ID NO: 4862 - DNA, 25 bp, artificial sequence
  antisense probe sequence
cccatatctcctttaatgacattga

SEQ ID NO: 4863 - DNA, 25 bp, artificial sequence
  antisense probe sequence
attgatgccaagcttttttgccaca

SEQ ID NO: 4864 - DNA, 25 bp, artificial sequence
  antisense probe sequence
tgatgccaagcttttttgccacaaa

SEQ ID NO: 4865 - DNA, 25 bp, artificial sequence
  antisense probe sequence
gggctttgtggaaacagctggtact

SEQ ID NO: 4866 - DNA, 25 bp, artificial sequence
  antisense probe sequence
cagcccttgcattgcagaggggccc

SEQ ID NO: 4867 - DNA, 25 bp, artificial sequence
  antisense probe sequence
tgaaagaggacaggctaccccttta

SEQ ID NO: 4868 - DNA, 25 bp, artificial sequence
  antisense probe sequence
aaactaaggccctcttgaatctctg

SEQ ID NO: 4869 - DNA, 25 bp, artificial sequence
  antisense probe sequence
gatacaaacatgttcctgggatcac

SEQ ID NO: 4870 - DNA, 25 bp, artificial sequence
  antisense probe sequence
agacaattgttggagagcccctcac

SEQ ID NO: 4871 - DNA, 25 bp, artificial sequence
  antisense probe sequence
atgaggcagacctgactctcttaag

SEQ ID NO: 4872 - DNA, 25 bp, artificial sequence
  antisense probe sequence
aactgctgtcccaaacatgcacttc

SEQ ID NO: 4873 - DNA, 25 bp, artificial sequence
  antisense probe sequence
aaacatgcacttccttgcttaaggt

SEQ ID NO: 4874 - DNA, 25 bp, artificial sequence
  antisense probe sequence
atggtacaagcaatgcctgcccatt

SEQ ID NO: 4875 - DNA, 25 bp, artificial sequence
  antisense probe sequence
tatggtgtacattcttcctgattat

SEQ ID NO: 4876 - DNA, 25 bp, artificial sequence
  antisense probe sequence
cttcctgattattttctacacatac

SEQ ID NO: 4877 - DNA, 25 bp, artificial sequence
  antisense probe sequence
gatcttaaagccacggagaagcctc

SEQ ID NO: 4878 - DNA, 25 bp, artificial sequence
  antisense probe sequence
tgcccttgtttcttgtggagtcagg

SEQ ID NO: 4879 - DNA, 25 bp, artificial sequence
  antisense probe sequence
atgaggcaaagaggcacctcctcca

SEQ ID NO: 4880 - DNA, 25 bp, artificial sequence
  antisense probe sequence
gaaggtccagctcagtggcacaagt

SEQ ID NO: 4881 - DNA, 25 bp, artificial sequence
  antisense probe sequence
gacgggtataatccctgagacccag

SEQ ID NO: 4882 - DNA, 25 bp, artificial sequence
  antisense probe sequence
gacccagattgtgacttgcaatgga

SEQ ID NO: 4883 - DNA, 25 bp, artificial sequence
  antisense probe sequence
agaaagggcaacttactcttcctgg

SEQ ID NO: 4884 - DNA, 25 bp, artificial sequence
  antisense probe sequence
actcttcctggcatcttattgtatt

SEQ ID NO: 4885 - DNA, 25 bp, artificial sequence
  antisense probe sequence
aatctcttactcaacgaacacatct

SEQ ID NO: 4886 - DNA, 25 bp, artificial sequence
  antisense probe sequence
catcttctgatgatttcccaaaatt

SEQ ID NO: 4887 - DNA, 25 bp, artificial sequence
  antisense probe sequence
attgcccaactctatgtttctttga

SEQ ID NO: 4888 - DNA, 25 bp, artificial sequence
  antisense probe sequence
tgaaggatggtgactgcgccatggc

SEQ ID NO: 4889 - DNA, 25 bp, artificial sequence
  antisense probe sequence
tcctttcctgtggaggctccactca

SEQ ID NO: 4890 - DNA, 25 bp, artificial sequence
  antisense probe sequence
tcctcctatgtcacctagagtgtgg

SEQ ID NO: 4891 - DNA, 25 bp, artificial sequence
  antisense probe sequence
aactcaaacaggctcaccaggcagt

SEQ ID NO: 4892 - DNA, 25 bp, artificial sequence
  antisense probe sequence
gatgcaacagtttgtcttcacattg

SEQ ID NO: 4893 - DNA, 25 bp, artificial sequence
  antisense probe sequence
ttcacattggaaggacacccctgga

SEQ ID NO: 4894 - DNA, 25 bp, artificial sequence
  antisense probe sequence
actagacctgtaaaacttcactgca

SEQ ID NO: 4895 - DNA, 25 bp, artificial sequence
  antisense probe sequence
gccacttctgaatctctgtaaggtt

SEQ ID NO: 4896 - DNA, 25 bp, artificial sequence
  antisense probe sequence
ttaccaaagcctctagtgtaccgtc

SEQ ID NO: 4897 - DNA, 25 bp, artificial sequence
  antisense probe sequence
tccaggttctccagatctcttaaga

SEQ ID NO: 4898 - DNA, 25 bp, artificial sequence
  antisense probe sequence
aagactgtactatagaggcctgggg

SEQ ID NO: 4899 - DNA, 25 bp, artificial sequence
  antisense probe sequence
ctttctatattgttatcagtccagg

SEQ ID NO: 4900 - DNA, 25 bp, artificial sequence
  antisense probe sequence
gacattggctctttgtttaggccta

SEQ ID NO: 4901 - DNA, 25 bp, artificial sequence
  antisense probe sequence
gaatttgtgacttagttctgccctt

SEQ ID NO: 4902 - DNA, 25 bp, artificial sequence
  antisense probe sequence
gaaagcagtcttccatcaaatcacc

SEQ ID NO: 4903 - DNA, 25 bp, artificial sequence
  antisense probe sequence
aatgcacggctaaactattcagagt

SEQ ID NO: 4904 - DNA, 25 bp, artificial sequence
  antisense probe sequence
aagtactatgctttaatgcttcttt

SEQ ID NO: 4905 - DNA, 25 bp, artificial sequence
  antisense probe sequence
gcttctttcatcttactagtatggc

SEQ ID NO: 4906 - DNA, 25 bp, artificial sequence
  antisense probe sequence
tatgttattcctctgtgttcacttc

SEQ ID NO: 4907 - DNA, 25 bp, artificial sequence
  antisense probe sequence
acttcgccttgctcttgaaagtgca

SEQ ID NO: 4908 - DNA, 25 bp, artificial sequence
  antisense probe sequence
gtatatcctatacacacatctcctt

SEQ ID NO: 4909 - DNA, 25 bp, artificial sequence
  antisense probe sequence
tgagaagtctacattgcttacattt

SEQ ID NO: 4910 - DNA, 25 bp, artificial sequence
  antisense probe sequence
ggatcaatgggtttaacttgggccg

SEQ ID NO: 4911 - DNA, 25 bp, artificial sequence
  antisense probe sequence
acttgggccggtactggacaaagca

SEQ ID NO: 4912 - DNA, 25 bp, artificial sequence
  antisense probe sequence
gacaaagcaggggccacaacagacc

SEQ ID NO: 4913 - DNA, 25 bp, artificial sequence
  antisense probe sequence
ccaagattcctgctgtttcctaggg

SEQ ID NO: 4914 - DNA, 25 bp, artificial sequence
  antisense probe sequence
ggggagccctcaacaaaattacatt

SEQ ID NO: 4915 - DNA, 25 bp, artificial sequence
  antisense probe sequence
aactagaagatgtacctctccagcc

SEQ ID NO: 4916 - DNA, 25 bp, artificial sequence
  antisense probe sequence
tccagccccaagtccaatttttgga

SEQ ID NO: 4917 - DNA, 25 bp, artificial sequence
  antisense probe sequence
gcctatcctcaatagcactagtact

SEQ ID NO: 4918 - DNA, 25 bp, artificial sequence
  antisense probe sequence
cactagtactttgcacaggacacat

SEQ ID NO: 4919 - DNA, 25 bp, artificial sequence
  antisense probe sequence
acacatatcaattccctttcagctg

SEQ ID NO: 4920 - DNA, 25 bp, artificial sequence
  antisense probe sequence
tgatacactgagtgcctctgaacca

SEQ ID NO: 4921 - DNA, 25 bp, artificial sequence
  antisense probe sequence
gaaggatggcatcaccgttgtggac

SEQ ID NO: 4922 - DNA, 25 bp, artificial sequence
  antisense probe sequence
tggcatcaccgttgtggactggccg

SEQ ID NO: 4923 - DNA, 25 bp, artificial sequence
  antisense probe sequence
gactggccgtttgacgatggggcgc

SEQ ID NO: 4924 - DNA, 25 bp, artificial sequence
  antisense probe sequence
ggtagtggaagactggctgagcctg

SEQ ID NO: 4925 - DNA, 25 bp, artificial sequence
  antisense probe sequence
catcaacagcaagcagctcacctac

SEQ ID NO: 4926 - DNA, 25 bp, artificial sequence
  antisense probe sequence
tcacctacctggagaaataccggcc

SEQ ID NO: 4927 - DNA, 25 bp, artificial sequence
  antisense probe sequence
cagaggctgcggttcaaagacccac

SEQ ID NO: 4928 - DNA, 25 bp, artificial sequence
  antisense probe sequence
gcacaagacccggtgctgcgttatg

SEQ ID NO: 4929 - DNA, 25 bp, artificial sequence
  antisense probe sequence
gcgttatgtagctcaggaccttggc

SEQ ID NO: 4930 - DNA, 25 bp, artificial sequence
  antisense probe sequence
gggcctggtcgtcatgtaggtcagg

SEQ ID NO: 4931 - DNA, 25 bp, artificial sequence
  antisense probe sequence
cctccgtgcacttgtgtccgaggag

SEQ ID NO: 4932 - DNA, 25 bp, artificial sequence
  antisense probe sequence
aaacctctcttagatctggaaccaa

SEQ ID NO: 4933 - DNA, 25 bp, artificial sequence
  antisense probe sequence
agccaccgatccagattcattaaga

SEQ ID NO: 4934 - DNA, 25 bp, artificial sequence
  antisense probe sequence
ttcattaagaccttctgacaccctg

SEQ ID NO: 4935 - DNA, 25 bp, artificial sequence
  antisense probe sequence
acaccctgcgagaagtcactgttac

SEQ ID NO: 4936 - DNA, 25 bp, artificial sequence
  antisense probe sequence
ggggccccttgatctgtaaaggtgt

SEQ ID NO: 4937 - DNA, 25 bp, artificial sequence
  antisense probe sequence
aaaggtgtcttccacgctatagtct

SEQ ID NO: 4938 - DNA, 25 bp, artificial sequence
  antisense probe sequence
gtggtgttgccacaaagcctggaat

SEQ ID NO: 4939 - DNA, 25 bp, artificial sequence
  antisense probe sequence
ggaatctacaccctgttaaccaaga

SEQ ID NO: 4940 - DNA, 25 bp, artificial sequence
  antisense probe sequence
tggatcaaaagcaaccttgtcccgc

SEQ ID NO: 4941 - DNA, 25 bp, artificial sequence
  antisense probe sequence
gtcccgcctcatacaaattaagtta

SEQ ID NO: 4942 - DNA, 25 bp, artificial sequence
  antisense probe sequence
tatggggtccatttttgcacttgta

SEQ ID NO: 4943 - DNA, 25 bp, artificial sequence
  antisense probe sequence
aaataacatacgcactcaacttcct

SEQ ID NO: 4944 - DNA, 25 bp, artificial sequence
  antisense probe sequence
cttgacagactctcgttctgtggcc

SEQ ID NO: 4945 - DNA, 25 bp, artificial sequence
  antisense probe sequence
actgctacctctaccatgagcaatt

SEQ ID NO: 4946 - DNA, 25 bp, artificial sequence
  antisense probe sequence
acctctaccatgagcaattctcctg

SEQ ID NO: 4947 - DNA, 25 bp, artificial sequence
  antisense probe sequence
tcaccacattcgtcaggttggtttc

SEQ ID NO: 4948 - DNA, 25 bp, artificial sequence
  antisense probe sequence
catcacacctggtcaactttctttt

SEQ ID NO: 4949 - DNA, 25 bp, artificial sequence
  antisense probe sequence
atatctttttccatcatgttacttt

SEQ ID NO: 4950 - DNA, 25 bp, artificial sequence
  antisense probe sequence
aatgtgtttcttacagactgcatgt

SEQ ID NO: 4951 - DNA, 25 bp, artificial sequence
  antisense probe sequence
acagactgcatgtagttgggtataa

SEQ ID NO: 4952 - DNA, 25 bp, artificial sequence
  antisense probe sequence
gttgggtataatttttatccagtct

SEQ ID NO: 4953 - DNA, 25 bp, artificial sequence
  antisense probe sequence
aatatctgtcttttaattggtgttt

SEQ ID NO: 4954 - DNA, 25 bp, artificial sequence
  antisense probe sequence
ttgccttgtaattcgacagctctac

SEQ ID NO: 4955 - DNA, 25 bp, artificial sequence
  antisense probe sequence
acttttagtgaccacgggctacatc

SEQ ID NO: 4956 - DNA, 25 bp, artificial sequence
  antisense probe sequence
gggctacatcatatgctttgttcct

SEQ ID NO: 4957 - DNA, 25 bp, artificial sequence
  antisense probe sequence
ataccctcagccagacagaagtcat

SEQ ID NO: 4958 - DNA, 25 bp, artificial sequence
  antisense probe sequence
gaagtcataactgattgctcaacca

SEQ ID NO: 4959 - DNA, 25 bp, artificial sequence
  antisense probe sequence
tgctcaaccaggatttcactcttca

SEQ ID NO: 4960 - DNA, 25 bp, artificial sequence
  antisense probe sequence
aagccaaagaggctacactgctcct

SEQ ID NO: 4961 - DNA, 25 bp, artificial sequence
  antisense probe sequence
tgctttgatcctatcctgtactatc

SEQ ID NO: 4962 - DNA, 25 bp, artificial sequence
  antisense probe sequence
aaagcattccgctcaaaggtcactg

SEQ ID NO: 4963 - DNA, 25 bp, artificial sequence
  antisense probe sequence
tcactgagacttttgcctcacctaa

SEQ ID NO: 4964 - DNA, 25 bp, artificial sequence
  antisense probe sequence
tgctaccaattctggccttactgga

SEQ ID NO: 4965 - DNA, 25 bp, artificial sequence
  antisense probe sequence
ttgagttctccttttaagtaccaat

SEQ ID NO: 4966 - DNA, 25 bp, artificial sequence
  antisense probe sequence
ggtgtgtcattgccttgaaatgctt

SEQ ID NO: 4967 - DNA, 25 bp, artificial sequence
  antisense probe sequence
gaaatgcttgcttagggcttctttt

SEQ ID NO: 4968 - DNA, 25 bp, artificial sequence
  antisense probe sequence
tagggcttcttttatgttatcttaa

SEQ ID NO: 4969 - DNA, 25 bp, artificial sequence
  antisense probe sequence
aagtgctggtgaattttccattttt

SEQ ID NO: 4970 - DNA, 25 bp, artificial sequence
  antisense probe sequence
ttccattttttacatccatttcaca

SEQ ID NO: 4971 - DNA, 25 bp, artificial sequence
  antisense probe sequence
gaaaggtaacaatcttcattctaca

SEQ ID NO: 4972 - DNA, 25 bp, artificial sequence
  antisense probe sequence
aatgcgtgcgtttcagtgtttaaga

SEQ ID NO: 4973 - DNA, 25 bp, artificial sequence
  antisense probe sequence
caagcagtttgtgtggtgtttctat

SEQ ID NO: 4974 - DNA, 25 bp, artificial sequence
  antisense probe sequence
aaatctgctggccagctatgtcctc

SEQ ID NO: 4975 - DNA, 25 bp, artificial sequence
  antisense probe sequence
taggaaatgacagacccaaccacca

SEQ ID NO: 4976 - DNA, 25 bp, artificial sequence
  antisense probe sequence
gaattgcaaaactgacatcccattt

SEQ ID NO: 4977 - DNA, 25 bp, artificial sequence
  antisense probe sequence
actgacatcccatttcacagcaata

SEQ ID NO: 4978 - DNA, 25 bp, artificial sequence
  antisense probe sequence
cacagcaatagtgacctttatttaa

SEQ ID NO: 4979 - DNA, 25 bp, artificial sequence
  antisense probe sequence
gttgtgttatagtttatgcttctta

SEQ ID NO: 4980 - DNA, 25 bp, artificial sequence
  antisense probe sequence
tttcaacctaaacagccaatttcta

SEQ ID NO: 4981 - DNA, 25 bp, artificial sequence
  antisense probe sequence
acagccaatttctaagcagacagga

SEQ ID NO: 4982 - DNA, 25 bp, artificial sequence
  antisense probe sequence
tattttctagattatccctgtgaat

SEQ ID NO: 4983 - DNA, 25 bp, artificial sequence
  antisense probe sequence
aaatcttaggtttgcttatgcccag

SEQ ID NO: 4984 - DNA, 25 bp, artificial sequence
  antisense probe sequence
gctgtttctcacatctatagtgaca

SEQ ID NO: 4985 - DNA, 25 bp, artificial sequence
  antisense probe sequence
ataggaggggttaaggttcatgaga

SEQ ID NO: 4986 - DNA, 25 bp, artificial sequence
  antisense probe sequence
ggtctgagatgggtgctgcaaagat

SEQ ID NO: 4987 - DNA, 25 bp, artificial sequence
  antisense probe sequence
gcagatttcttgcttcatatgacaa

SEQ ID NO: 4988 - DNA, 25 bp, artificial sequence
  antisense probe sequence
atgacaaagcctcaattactaattg

SEQ ID NO: 4989 - DNA, 25 bp, artificial sequence
  antisense probe sequence
aactattcccagaatcatgttcaaa

SEQ ID NO: 4990 - DNA, 25 bp, artificial sequence
  antisense probe sequence
gaaagtgcttcattgactaaacagt

SEQ ID NO: 4991 - DNA, 25 bp, artificial sequence
  antisense probe sequence
gaaatggcacaaacaccttaagcaa

SEQ ID NO: 4992 - DNA, 25 bp, artificial sequence
  antisense probe sequence
accttaagcaatatattttcctagt

SEQ ID NO: 4993 - DNA, 25 bp, artificial sequence
  antisense probe sequence
gaacttttctattaactaccatgtc

SEQ ID NO: 4994 - DNA, 25 bp, artificial sequence
  antisense probe sequence
aatgctttgttaatgcttttcccac

SEQ ID NO: 4995 - DNA, 25 bp, artificial sequence
  antisense probe sequence
cttttcccactctcatttgttaatg

SEQ ID NO: 4996 - DNA, 25 bp, artificial sequence
  antisense probe sequence
ggatttgcattttgagctttatctc

SEQ ID NO: 4997 - DNA, 25 bp, artificial sequence
  antisense probe sequence
gctttatctctaaatgtgacatgca

SEQ ID NO: 4998 - DNA, 25 bp, artificial sequence
  antisense probe sequence
agagagacacagctgcagaggccac

SEQ ID NO: 4999 - DNA, 25 bp, artificial sequence
  antisense probe sequence
acctggattgcgcctaatgtgtttg

SEQ ID NO: 5000 - DNA, 25 bp, artificial sequence
  antisense probe sequence
tgattgaatctacttgcacactctc

SEQ ID NO: 5001 - DNA, 25 bp, artificial sequence
  antisense probe sequence
gcacactctcccattatatttattg

SEQ ID NO: 5002 - DNA, 25 bp, artificial sequence
  antisense probe sequence
aacccaagttagttcaatcctgatt

SEQ ID NO: 5003 - DNA, 25 bp, artificial sequence
  antisense probe sequence
gaaggtttgcagatattctctagtc

SEQ ID NO: 5004 - DNA, 25 bp, artificial sequence
  antisense probe sequence
gacatatcacatgtcagccactgtg

SEQ ID NO: 5005 - DNA, 25 bp, artificial sequence
  antisense probe sequence
atggccagtaagatcaatgtgacgg

SEQ ID NO: 5006 - DNA, 25 bp, artificial sequence
  antisense probe sequence
tgtgacggcagggaaatgtatgtgt

SEQ ID NO: 5007 - DNA, 25 bp, artificial sequence
  antisense probe sequence
cagtgtgtggtcaacatttctcatg

SEQ ID NO: 5008 - DNA, 25 bp, artificial sequence
  antisense probe sequence
atgttaattatgcagtgtttccctc

SEQ ID NO: 5009 - DNA, 25 bp, artificial sequence
  antisense probe sequence
tagtctaattgaatcccttaaactc

SEQ ID NO: 5010 - DNA, 25 bp, artificial sequence
  antisense probe sequence
atgggatgatcgtgtatttattttt

SEQ ID NO: 5011 - DNA, 25 bp, artificial sequence
  antisense probe sequence
ttttttacttcctcagctgtagaca

SEQ ID NO: 5012 - DNA, 25 bp, artificial sequence
  antisense probe sequence
acttcctcagctgtagacaggtcct

SEQ ID NO: 5013 - DNA, 25 bp, artificial sequence
  antisense probe sequence
gacaggtccttttcgatggtacata

SEQ ID NO: 5014 - DNA, 25 bp, artificial sequence
  antisense probe sequence
tggtacatatttctttgcctttata

SEQ ID NO: 5015 - DNA, 25 bp, artificial sequence
  antisense probe sequence
tataatcttttatacagtgtcttac

SEQ ID NO: 5016 - DNA, 25 bp, artificial sequence
  antisense probe sequence
gtgatgtggcaaatctctattagga

SEQ ID NO: 5017 - DNA, 25 bp, artificial sequence
  antisense probe sequence
atattctgtaatcttcagacctaga

SEQ ID NO: 5018 - DNA, 25 bp, artificial sequence
  antisense probe sequence
aggtttgtgactttcctaaatcaat

SEQ ID NO: 5019 - DNA, 25 bp, artificial sequence
  antisense probe sequence
tacgtgcaatacttcaatacttcat

SEQ ID NO: 5020 - DNA, 25 bp, artificial sequence
  antisense probe sequence
ggcataggaacagttttctcttcat

SEQ ID NO: 5021 - DNA, 25 bp, artificial sequence
  antisense probe sequence
aattcagtatttgtcattatgcagt

SEQ ID NO: 5022 - DNA, 25 bp, artificial sequence
  antisense probe sequence
atacctacataagtctattccatta

SEQ ID NO: 5023 - DNA, 25 bp, artificial sequence
  antisense probe sequence
ttttgcgcttggcatatttattcct

SEQ ID NO: 5024 - DNA, 25 bp, artificial sequence
  antisense probe sequence
agctgggtataccattatttcaagt

SEQ ID NO: 5025 - DNA, 25 bp, artificial sequence
  antisense probe sequence
gaacacattttctatagcccttaat

SEQ ID NO: 5026 - DNA, 25 bp, artificial sequence
  antisense probe sequence
tatagcccttaatttagttgtgtta

SEQ ID NO: 5027 - DNA, 25 bp, artificial sequence
  antisense probe sequence
ggtgatgtatcaacagctttttttt

SEQ ID NO: 5028 - DNA, 25 bp, artificial sequence
  antisense probe sequence
gtatgaattgagctttttgcccaca

SEQ ID NO: 5029 - DNA, 25 bp, artificial sequence
  antisense probe sequence
ttttgcccacagattcttgatttgt

SEQ ID NO: 5030 - DNA, 25 bp, artificial sequence
  antisense probe sequence
cttgatttgtagttgtttggcagga

SEQ ID NO: 5031 - DNA, 25 bp, artificial sequence
  antisense probe sequence
gattgagtcatcgacattcaggatt

SEQ ID NO: 5032 - DNA, 25 bp, artificial sequence
  antisense probe sequence
aggatttaagtctgaggtagtcaac

SEQ ID NO: 5033 - DNA, 25 bp, artificial sequence
  antisense probe sequence
aaaaatggcttatctgaaatcagta

SEQ ID NO: 5034 - DNA, 25 bp, artificial sequence
  antisense probe sequence
atgcttctggaattgagttctcctt

SEQ ID NO: 5035 - DNA, 25 bp, artificial sequence
  antisense probe sequence
gagttctccttttaagtaccaatga

SEQ ID NO: 5036 - DNA, 25 bp, artificial sequence
  antisense probe sequence
tgtaatggtgtgtcattgccttgaa

SEQ ID NO: 5037 - DNA, 25 bp, artificial sequence
  antisense probe sequence
gtgtcattgccttgaaatgcttgct

SEQ ID NO: 5038 - DNA, 25 bp, artificial sequence
  antisense probe sequence
tgaaatgcttgcttagggcttcttt

SEQ ID NO: 5039 - DNA, 25 bp, artificial sequence
  antisense probe sequence
aaaagtctagattggtcttgatatt

SEQ ID NO: 5040 - DNA, 25 bp, artificial sequence
  antisense probe sequence
caatcttcattctacagatgaactc

SEQ ID NO: 5041 - DNA, 25 bp, artificial sequence
  antisense probe sequence
gcgtgcgtttcagtgtttaagaagg

SEQ ID NO: 5042 - DNA, 25 bp, artificial sequence
  antisense probe sequence
gaaagtgtcctatttgtaggagtac

SEQ ID NO: 5043 - DNA, 25 bp, artificial sequence
  antisense probe sequence
ggagtacaatcaagggtacagttcg

SEQ ID NO: 5044 - DNA, 25 bp, artificial sequence
  antisense probe sequence
gtacagttcgtacatttctttcatg

SEQ ID NO: 5045 - DNA, 25 bp, artificial sequence
  antisense probe sequence
ataggcttttgttcttatgaacgaa

SEQ ID NO: 5046 - DNA, 25 bp, artificial sequence
  antisense probe sequence
aagaggtagcactacaaacacaata

SEQ ID NO: 5047 - DNA, 25 bp, artificial sequence
  antisense probe sequence
aatattttggcattgtactaatacc

SEQ ID NO: 5048 - DNA, 25 bp, artificial sequence
  antisense probe sequence
ggcagcatactgagaccctgccttt

SEQ ID NO: 5049 - DNA, 25 bp, artificial sequence
  antisense probe sequence
aaaacaccagggacacatttctctg

SEQ ID NO: 5050 - DNA, 25 bp, artificial sequence
  antisense probe sequence
cagggacacatttctctgtcttttt

SEQ ID NO: 5051 - DNA, 25 bp, artificial sequence
  antisense probe sequence
tttgatcagtgtcctatacatcgaa

SEQ ID NO: 5052 - DNA, 25 bp, artificial sequence
  antisense probe sequence
gtcctatacatcgaaggtgtgcata

SEQ ID NO: 5053 - DNA, 25 bp, artificial sequence
  antisense probe sequence
aaaggccacactggtgtgcctggcc

SEQ ID NO: 5054 - DNA, 25 bp, artificial sequence
  antisense probe sequence
tgactccagatactgcctgagcagc

SEQ ID NO: 5055 - DNA, 25 bp, artificial sequence
  antisense probe sequence
tccgctgtcaagtccagttctacgg

SEQ ID NO: 5056 - DNA, 25 bp, artificial sequence
  antisense probe sequence
cgccgaggcctggggtagagcagac

SEQ ID NO: 5057 - DNA, 25 bp, artificial sequence
  antisense probe sequence
tagagcagactgtggctttacctcg

SEQ ID NO: 5058 - DNA, 25 bp, artificial sequence
  antisense probe sequence
ccaccatcctctatgagatcctgct

SEQ ID NO: 5059 - DNA, 25 bp, artificial sequence
  antisense probe sequence
agatcctgctagggaaggccaccat

SEQ ID NO: 5060 - DNA, 25 bp, artificial sequence
  antisense probe sequence
aaggccaccatgtatgctgtgctgg

SEQ ID NO: 5061 - DNA, 25 bp, artificial sequence
  antisense probe sequence
cgcccttgtgttgatggccatggtc

SEQ ID NO: 5062 - DNA, 25 bp, artificial sequence
  antisense probe sequence
agcttctaacccgtcatggtttcaa

SEQ ID NO: 5063 - DNA, 25 bp, artificial sequence
  antisense probe sequence
caatacacattcttcttttgccagc

SEQ ID NO: 5064 - DNA, 25 bp, artificial sequence
  antisense probe sequence
ggaacaagacttcaggtcacgctcg

SEQ ID NO: 5065 - DNA, 25 bp, artificial sequence
  antisense probe sequence
tcaggtcacgctcgatatccagaac

SEQ ID NO: 5066 - DNA, 25 bp, artificial sequence
  antisense probe sequence
tgacaagtctgtctgcctattcacc

SEQ ID NO: 5067 - DNA, 25 bp, artificial sequence
  antisense probe sequence
gagcaacagtgctgtggcctggagc

SEQ ID NO: 5068 - DNA, 25 bp, artificial sequence
  antisense probe sequence
gcatgtgcaaacgccttcaacaaca

SEQ ID NO: 5069 - DNA, 25 bp, artificial sequence
  antisense probe sequence
tccccagcccagaaagttcctgtga

SEQ ID NO: 5070 - DNA, 25 bp, artificial sequence
  antisense probe sequence
gttcctgtgatgtcaagctggtcga

SEQ ID NO: 5071 - DNA, 25 bp, artificial sequence
  antisense probe sequence
cagtgattgggttccgaatcctcct

SEQ ID NO: 5072 - DNA, 25 bp, artificial sequence
  antisense probe sequence
aagtggccgggtttaatctgctcat

SEQ ID NO: 5073 - DNA, 25 bp, artificial sequence
  antisense probe sequence
gctgtggtccagctgagatctgcaa

SEQ ID NO: 5074 - DNA, 25 bp, artificial sequence
  antisense probe sequence
gattgtaagacagcctgtgctccct

SEQ ID NO: 5075 - DNA, 25 bp, artificial sequence
  antisense probe sequence
ggtgctgccctgtgtacatataaat

SEQ ID NO: 5076 - DNA, 25 bp, artificial sequence
  antisense probe sequence
ggtgttggggaaaccttcatctgaa

SEQ ID NO: 5077 - DNA, 25 bp, artificial sequence
  antisense probe sequence
agactctgagctgctcaccggagtc

SEQ ID NO: 5078 - DNA, 25 bp, artificial sequence
  antisense probe sequence
gctgctcaccggagtcattgggaag

SEQ ID NO: 5079 - DNA, 25 bp, artificial sequence
  antisense probe sequence
ctagagtctcagaaactcccctggg

SEQ ID NO: 5080 - DNA, 25 bp, artificial sequence
  antisense probe sequence
ggaggaattcagctcagcttcttcc

SEQ ID NO: 5081 - DNA, 25 bp, artificial sequence
  antisense probe sequence
acaagagtttgttctgttctggggg

SEQ ID NO: 5082 - DNA, 25 bp, artificial sequence
  antisense probe sequence
tctgggggacagagaaggcgcttcc

SEQ ID NO: 5083 - DNA, 25 bp, artificial sequence
  antisense probe sequence
gcttcccaacttcatactggcagga

SEQ ID NO: 5084 - DNA, 25 bp, artificial sequence
  antisense probe sequence
ggtgaggaggttcactgagctcccc

SEQ ID NO: 5085 - DNA, 25 bp, artificial sequence
  antisense probe sequence
cccactgcggggagacagaagcctg

SEQ ID NO: 5086 - DNA, 25 bp, artificial sequence
  antisense probe sequence
ccagcacgggcttcagtagtggacc

SEQ ID NO: 5087 - DNA, 25 bp, artificial sequence
  antisense probe sequence
ggacccagttctattgttggcttca

SEQ ID NO: 5088 - DNA, 25 bp, artificial sequence
  antisense probe sequence
gcttcagcggtggaccaagcactgg

SEQ ID NO: 5089 - DNA, 25 bp, artificial sequence
  antisense probe sequence
ccaagcactggtgttggcttctgca

SEQ ID NO: 5090 - DNA, 25 bp, artificial sequence
  antisense probe sequence
agtggaccaagcaccagtggcttca

SEQ ID NO: 5091 - DNA, 25 bp, artificial sequence
  antisense probe sequence
gcttcagcggtggaccgagcacagg

SEQ ID NO: 5092 - DNA, 25 bp, artificial sequence
  antisense probe sequence
ccgagcacaggagctggcttcggcg

SEQ ID NO: 5093 - DNA, 25 bp, artificial sequence
  antisense probe sequence
cttcggcggtggaccaaacactggt

SEQ ID NO: 5094 - DNA, 25 bp, artificial sequence
  antisense probe sequence
accgagcaccagtgctggctttggc

SEQ ID NO: 5095 - DNA, 25 bp, artificial sequence
  antisense probe sequence
tgctggctttggcagtggagccgcc

SEQ ID NO: 5096 - DNA, 25 bp, artificial sequence
  antisense probe sequence
gtggcttctcgtatggctagtgagg

SEQ ID NO: 5097 - DNA, 25 bp, artificial sequence
  antisense probe sequence
gccatcagaagcagagatctcccac

SEQ ID NO: 5098 - DNA, 25 bp, artificial sequence
  antisense probe sequence
cctcaatgactccagatactgcctg

SEQ ID NO: 5099 - DNA, 25 bp, artificial sequence
  antisense probe sequence
caatgactccagatactgcctgagc

SEQ ID NO: 5100 - DNA, 25 bp, artificial sequence
  antisense probe sequence
tccgctgtcaagtccagttctacgg

SEQ ID NO: 5101 - DNA, 25 bp, artificial sequence
  antisense probe sequence
ctgtcaagtccagttctacgggctc

SEQ ID NO: 5102 - DNA, 25 bp, artificial sequence
  antisense probe sequence
cagttctacgggctctcggagaatg

SEQ ID NO: 5103 - DNA, 25 bp, artificial sequence
  antisense probe sequence
tcggagaatgacgagtggacccagg

SEQ ID NO: 5104 - DNA, 25 bp, artificial sequence
  antisense probe sequence
aatgacgagtggacccaggataggg

SEQ ID NO: 5105 - DNA, 25 bp, artificial sequence
  antisense probe sequence
ccgaggcctggggtagagcagactg

SEQ ID NO: 5106 - DNA, 25 bp, artificial sequence
  antisense probe sequence
cctggggtagagcagactgtggctt

SEQ ID NO: 5107 - DNA, 25 bp, artificial sequence
  antisense probe sequence
tgatggccatggtcaagagaaagga

SEQ ID NO: 5108 - DNA, 25 bp, artificial sequence
  antisense probe sequence
ggagccaatccatgcagatattttg

SEQ ID NO: 5109 - DNA, 25 bp, artificial sequence
  antisense probe sequence
tggctgaatttcagagcatcccgcg

SEQ ID NO: 5110 - DNA, 25 bp, artificial sequence
  antisense probe sequence
gaagctcgaaagccctttaaccaga

SEQ ID NO: 5111 - DNA, 25 bp, artificial sequence
  antisense probe sequence
atgttgacattcttccttatgatta

SEQ ID NO: 5112 - DNA, 25 bp, artificial sequence
  antisense probe sequence
gattataaccgtgttgaactctctg

SEQ ID NO: 5113 - DNA, 25 bp, artificial sequence
  antisense probe sequence
gggtcaaactacataaatgccagct

SEQ ID NO: 5114 - DNA, 25 bp, artificial sequence
  antisense probe sequence
tacattgctgcacaaggtcccaggg

SEQ ID NO: 5115 - DNA, 25 bp, artificial sequence
  antisense probe sequence
gccacagttattgtcatggtcactc

SEQ ID NO: 5116 - DNA, 25 bp, artificial sequence
  antisense probe sequence
aagtgtgcagaatactggccgtcaa

SEQ ID NO: 5117 - DNA, 25 bp, artificial sequence
  antisense probe sequence
ggccgtcaatggaagagggcactcg

SEQ ID NO: 5118 - DNA, 25 bp, artificial sequence
  antisense probe sequence
agggcactcgggcttttggagatgt

SEQ ID NO: 5119 - DNA, 25 bp, artificial sequence
  antisense probe sequence
tcctccttgttctactcatatatat

SEQ ID NO: 5120 - DNA, 25 bp, artificial sequence
  antisense probe sequence
gttctactcatatatatctatctta

SEQ ID NO: 5121 - DNA, 25 bp, artificial sequence
  antisense probe sequence
tatgtgtgtgtatgctactacaaaa

SEQ ID NO: 5122 - DNA, 25 bp, artificial sequence
  antisense probe sequence
attccatatattagcatttagtcca

SEQ ID NO: 5123 - DNA, 25 bp, artificial sequence
  antisense probe sequence
gcatttagtccaatgtctttttaag

SEQ ID NO: 5124 - DNA, 25 bp, artificial sequence
  antisense probe sequence
gtgagcttatcatgctgtctttaca

SEQ ID NO: 5125 - DNA, 25 bp, artificial sequence
  antisense probe sequence
gctgtctttacatggggttttcaat

SEQ ID NO: 5126 - DNA, 25 bp, artificial sequence
  antisense probe sequence
gttttcaattttgcatgctcgatta

SEQ ID NO: 5127 - DNA, 25 bp, artificial sequence
  antisense probe sequence
atgctcgattattccctgtacaata

SEQ ID NO: 5128 - DNA, 25 bp, artificial sequence
  antisense probe sequence
tattgcttgatacttttgacaacaa

SEQ ID NO: 5129 - DNA, 25 bp, artificial sequence
  antisense probe sequence
attgcatatgcatagttcccatgtt

SEQ ID NO: 5130 - DNA, 25 bp, artificial sequence
  antisense probe sequence
gtatcaaaatcttccaattatcatg

SEQ ID NO: 5131 - DNA, 25 bp, artificial sequence
  antisense probe sequence
atcttccaattatcatgctcacctg

SEQ ID NO: 5132 - DNA, 25 bp, artificial sequence
  antisense probe sequence
tccaattatcatgctcacctgaaag

SEQ ID NO: 5133 - DNA, 25 bp, artificial sequence
  antisense probe sequence
gctcacctgaaagaggtatgctctc

SEQ ID NO: 5134 - DNA, 25 bp, artificial sequence
  antisense probe sequence
gaggtatgctctcttaggaatacag

SEQ ID NO: 5135 - DNA, 25 bp, artificial sequence
  antisense probe sequence
taggaatacagtttctagcattaaa

SEQ ID NO: 5136 - DNA, 25 bp, artificial sequence
  antisense probe sequence
taataaaatgttcctcgcattcccc

SEQ ID NO: 5137 - DNA, 25 bp, artificial sequence
  antisense probe sequence
agtttcactgtgtagagaacatata

SEQ ID NO: 5138 - DNA, 25 bp, artificial sequence
  antisense probe sequence
ataggtcaattatatgtctccatta

SEQ ID NO: 5139 - DNA, 25 bp, artificial sequence
  antisense probe sequence
aaacatgttctagaactagttacaa

SEQ ID NO: 5140 - DNA, 25 bp, artificial sequence
  antisense probe sequence
aaatatatttggacataacagactt

SEQ ID NO: 5141 - DNA, 25 bp, artificial sequence
  antisense probe sequence
ggtggccgagagtaaatgtggggac

SEQ ID NO: 5142 - DNA, 25 bp, artificial sequence
  antisense probe sequence
gtaaatgtggggacctagaggagga

SEQ ID NO: 5143 - DNA, 25 bp, artificial sequence
  antisense probe sequence
tggaggcccaggcggacaagtattc

SEQ ID NO: 5144 - DNA, 25 bp, artificial sequence
  antisense probe sequence
caggcggacaagtattccaccaaag

SEQ ID NO: 5145 - DNA, 25 bp, artificial sequence
  antisense probe sequence
gatgaagtctatgcccagaagatga

SEQ ID NO: 5146 - DNA, 25 bp, artificial sequence
  antisense probe sequence
aggaactggacaacgcactcaatga

SEQ ID NO: 5147 - DNA, 25 bp, artificial sequence
  antisense probe sequence
gacaacgcactcaatgacatcacct

SEQ ID NO: 5148 - DNA, 25 bp, artificial sequence
  antisense probe sequence
tcctttccattctctctatggggag

SEQ ID NO: 5149 - DNA, 25 bp, artificial sequence
  antisense probe sequence
gaggagcagaaattgccaacattgc

SEQ ID NO: 5150 - DNA, 25 bp, artificial sequence
  antisense probe sequence
ttgccaacattgcacagccaggctg

SEQ ID NO: 5151 - DNA, 25 bp, artificial sequence
  antisense probe sequence
ctgggagcagcctagggagagcccc

SEQ ID NO: 5152 - DNA, 25 bp, artificial sequence
  antisense probe sequence
accaatgaggttcctgaggtcacag

SEQ ID NO: 5153 - DNA, 25 bp, artificial sequence
  antisense probe sequence
atgaggttcctgaggtcacagtgtt

SEQ ID NO: 5154 - DNA, 25 bp, artificial sequence
  antisense probe sequence
aggttcctgaggtcacagtgttttc

SEQ ID NO: 5155 - DNA, 25 bp, artificial sequence
  antisense probe sequence
tcctgaggtcacagtgttttccaag

SEQ ID NO: 5156 - DNA, 25 bp, artificial sequence
  antisense probe sequence
gtcttgtggacaacatctttcctcc

SEQ ID NO: 5157 - DNA, 25 bp, artificial sequence
  antisense probe sequence
ctctccaagagtgatcattccttct

SEQ ID NO: 5158 - DNA, 25 bp, artificial sequence
  antisense probe sequence
ccaagagtgatcattccttcttcaa

SEQ ID NO: 5159 - DNA, 25 bp, artificial sequence
  antisense probe sequence
agagtgatcattccttcttcaagat

SEQ ID NO: 5160 - DNA, 25 bp, artificial sequence
  antisense probe sequence
agtgatcattccttcttcaagatca

SEQ ID NO: 5161 - DNA, 25 bp, artificial sequence
  antisense probe sequence
gatgagatttatgactgcaaggtgg

SEQ ID NO: 5162 - DNA, 25 bp, artificial sequence
  antisense probe sequence
cctcttctgaaacactgggagcctg

SEQ ID NO: 5163 - DNA, 25 bp, artificial sequence
  antisense probe sequence
ggatgcttagcatgcaagttccctc

SEQ ID NO: 5164 - DNA, 25 bp, artificial sequence
  antisense probe sequence
ctccatcattgccaccttggtagag

SEQ ID NO: 5165 - DNA, 25 bp, artificial sequence
  antisense probe sequence
tggtagagagggatggctccccacc

SEQ ID NO: 5166 - DNA, 25 bp, artificial sequence
  antisense probe sequence
ccaccctcagcgttggggattcacg

SEQ ID NO: 5167 - DNA, 25 bp, artificial sequence
  antisense probe sequence
cctccttcttggttgtcatagtgat

SEQ ID NO: 5168 - DNA, 25 bp, artificial sequence
  antisense probe sequence
gtgatagggtagccttattgccccc

SEQ ID NO: 5169 - DNA, 25 bp, artificial sequence
  antisense probe sequence
tctacactagtgccatgggaaccag

SEQ ID NO: 5170 - DNA, 25 bp, artificial sequence
  antisense probe sequence
gtgactcaagactcgaggccgatac

SEQ ID NO: 5171 - DNA, 25 bp, artificial sequence
  antisense probe sequence
gccgatacgaggctgtgattctgcc

SEQ ID NO: 5172 - DNA, 25 bp, artificial sequence
  antisense probe sequence
gattctgcctttggatggatgttgc

SEQ ID NO: 5173 - DNA, 25 bp, artificial sequence
  antisense probe sequence
tacagacttgtactaacacaccgta

SEQ ID NO: 5174 - DNA, 25 bp, artificial sequence
  antisense probe sequence
tgactccagatactgcctgagcagc

SEQ ID NO: 5175 - DNA, 25 bp, artificial sequence
  antisense probe sequence
tccgctgtcaagtccagttctacgg

SEQ ID NO: 5176 - DNA, 25 bp, artificial sequence
  antisense probe sequence
tagagcagactgtggctttacctcg

SEQ ID NO: 5177 - DNA, 25 bp, artificial sequence
  antisense probe sequence
ccaccatcctctatgagatcctgct

SEQ ID NO: 5178 - DNA, 25 bp, artificial sequence
  antisense probe sequence
gagatcctgctagggaaggccaccc

SEQ ID NO: 5179 - DNA, 25 bp, artificial sequence
  antisense probe sequence
caccctgtatgctgtgctggtcagc

SEQ ID NO: 5180 - DNA, 25 bp, artificial sequence
  antisense probe sequence
caatacacattcttcttttgccagc

SEQ ID NO: 5181 - DNA, 25 bp, artificial sequence
  antisense probe sequence
gccagcgcttctgaagagctgctct

SEQ ID NO: 5182 - DNA, 25 bp, artificial sequence
  antisense probe sequence
acctctctgcatcccaatagatatc

SEQ ID NO: 5183 - DNA, 25 bp, artificial sequence
  antisense probe sequence
aatagatatccccctatgtgcatgc

SEQ ID NO: 5184 - DNA, 25 bp, artificial sequence
  antisense probe sequence
gggggaccttagcatgcctaagtga

SEQ ID NO: 5185 - DNA, 25 bp, artificial sequence
  antisense probe sequence
gggaacactgctctcagacattaca

SEQ ID NO: 5186 - DNA, 25 bp, artificial sequence
  antisense probe sequence
gactggacctgggaaaacgcatcct

SEQ ID NO: 5187 - DNA, 25 bp, artificial sequence
  antisense probe sequence
cgcatcctggacccacgaggaatat

SEQ ID NO: 5188 - DNA, 25 bp, artificial sequence
  antisense probe sequence
gaatctaccgtgcaagttcattatc

SEQ ID NO: 5189 - DNA, 25 bp, artificial sequence
  antisense probe sequence
gtgtggagctggatccagccaccgt

SEQ ID NO: 5190 - DNA, 25 bp, artificial sequence
  antisense probe sequence
agactggaaggctgtctggggctgc

SEQ ID NO: 5191 - DNA, 25 bp, artificial sequence
  antisense probe sequence
tgccgacacacaagctctgttgagg

SEQ ID NO: 5192 - DNA, 25 bp, artificial sequence
  antisense probe sequence
ggaatgaccaggtctatcagcccct

SEQ ID NO: 5193 - DNA, 25 bp, artificial sequence
  antisense probe sequence
agcccctccgagatcgagatgatgc

SEQ ID NO: 5194 - DNA, 25 bp, artificial sequence
  antisense probe sequence
tgctcagtacagccaccttggagga

SEQ ID NO: 5195 - DNA, 25 bp, artificial sequence
  antisense probe sequence
gaagcagccattaccaactgtacct

SEQ ID NO: 5196 - DNA, 25 bp, artificial sequence
  antisense probe sequence
gtttgagttttgtagggccatcacc

SEQ ID NO: 5197 - DNA, 25 bp, artificial sequence
  antisense probe sequence
gggccatcacctggaaagtcaatgt

SEQ ID NO: 5198 - DNA, 25 bp, artificial sequence
  antisense probe sequence
ctacttttcttcctacagcttatta

SEQ ID NO: 5199 - DNA, 25 bp, artificial sequence
  antisense probe sequence
gtaggttctatgacctcacttcatg

SEQ ID NO: 5200 - DNA, 25 bp, artificial sequence
  antisense probe sequence
cacttcatgggttccaggcaattcc

SEQ ID NO: 5201 - DNA, 25 bp, artificial sequence
  antisense probe sequence
gcaattccgctgaaaggtttgtctc

SEQ ID NO: 5202 - DNA, 25 bp, artificial sequence
  antisense probe sequence
gaagcctaacattctccattgtgga

SEQ ID NO: 5203 - DNA, 25 bp, artificial sequence
  antisense probe sequence
tttttccagcttacacatgtgggat

SEQ ID NO: 5204 - DNA, 25 bp, artificial sequence
  antisense probe sequence
ggagagtcaatactcctgacgagtc

SEQ ID NO: 5205 - DNA, 25 bp, artificial sequence
  antisense probe sequence
ggggcatttttatgccttcttaact

SEQ ID NO: 5206 - DNA, 25 bp, artificial sequence
  antisense probe sequence
ggctgaactataggccattgttccc

SEQ ID NO: 5207 - DNA, 25 bp, artificial sequence
  antisense probe sequence
ggttcaccttggcatcaatttgccc

SEQ ID NO: 5208 - DNA, 25 bp, artificial sequence
  antisense probe sequence
tttgccctgaaacttagctgtgctg

SEQ ID NO: 5209 - DNA, 25 bp, artificial sequence
  antisense probe sequence
agctgtgctgggattattctccttg

SEQ ID NO: 5210 - DNA, 25 bp, artificial sequence
  antisense probe sequence
attctccttgtcttggttgttactg

SEQ ID NO: 5211 - DNA, 25 bp, artificial sequence
  antisense probe sequence
gggttgagtgtttcagtgacatcct

SEQ ID NO: 5212 - DNA, 25 bp, artificial sequence
  antisense probe sequence
ccgggtctcttaaactgcccaatat

SEQ ID NO: 5213 - DNA, 25 bp, artificial sequence
  antisense probe sequence
tgttattttctcacactgtcaaccc

SEQ ID NO: 5214 - DNA, 25 bp, artificial sequence
  antisense probe sequence
aacagtctagctgattgttccacca

SEQ ID NO: 5215 - DNA, 25 bp, artificial sequence
  antisense probe sequence
ttgttccaccaaagaatccagcctg

SEQ ID NO: 5216 - DNA, 25 bp, artificial sequence
  antisense probe sequence
tccagcctgctgcttattcgagata

SEQ ID NO: 5217 - DNA, 25 bp, artificial sequence
  antisense probe sequence
aaaacagctgtatttccatctcaca

SEQ ID NO: 5218 - DNA, 25 bp, artificial sequence
  antisense probe sequence
tgagatgggagctgtcttcccagcc

SEQ ID NO: 5219 - DNA, 25 bp, artificial sequence
  antisense probe sequence
catcgtgggcatcattgctggcctg

SEQ ID NO: 5220 - DNA, 25 bp, artificial sequence
  antisense probe sequence
tgatcactggagctgtggtcgctgc

SEQ ID NO: 5221 - DNA, 25 bp, artificial sequence
  antisense probe sequence
gtcgctgccgtgatgtggaggagga

SEQ ID NO: 5222 - DNA, 25 bp, artificial sequence
  antisense probe sequence
ggctgcaagcagtgacagtgcccag

SEQ ID NO: 5223 - DNA, 25 bp, artificial sequence
  antisense probe sequence
agacagctgccttgtgtgggactga

SEQ ID NO: 5224 - DNA, 25 bp, artificial sequence
  antisense probe sequence
gaagaaccctgactttgtttctgca

SEQ ID NO: 5225 - DNA, 25 bp, artificial sequence
  antisense probe sequence
tgcatgtgtctgtgttcgtgtaggc

SEQ ID NO: 5226 - DNA, 25 bp, artificial sequence
  antisense probe sequence
caatcatctttcctgttccagagag

SEQ ID NO: 5227 - DNA, 25 bp, artificial sequence
  antisense probe sequence
catctctgtctcaacttcatggtgc

SEQ ID NO: 5228 - DNA, 25 bp, artificial sequence
  antisense probe sequence
tggtgcactgagctgtaacttcttc

SEQ ID NO: 5229 - DNA, 25 bp, artificial sequence
  antisense probe sequence
acagagacgcaagagaaaaatccac

SEQ ID NO: 5230 - DNA, 25 bp, artificial sequence
  antisense probe sequence
aatccactgccttccaaagaaacga

SEQ ID NO: 5231 - DNA, 25 bp, artificial sequence
  antisense probe sequence
cactgccttccaaagaaacgattga

SEQ ID NO: 5232 - DNA, 25 bp, artificial sequence
  antisense probe sequence
ggagaagcaagcaggcgaatcgtaa

SEQ ID NO: 5233 - DNA, 25 bp, artificial sequence
  antisense probe sequence
agcaggcgaatcgtaatgaggcgtg

SEQ ID NO: 5234 - DNA, 25 bp, artificial sequence
  antisense probe sequence
tgcactgtacattccacaagcattg

SEQ ID NO: 5235 - DNA, 25 bp, artificial sequence
  antisense probe sequence
actgtacattccacaagcattgcct

SEQ ID NO: 5236 - DNA, 25 bp, artificial sequence
  antisense probe sequence
agatgcaaagaggttggatcaagtt

SEQ ID NO: 5237 - DNA, 25 bp, artificial sequence
  antisense probe sequence
aagtttaaatgactgtgctgcccct

SEQ ID NO: 5238 - DNA, 25 bp, artificial sequence
  antisense probe sequence
gaaagaacttgcatgttggtgaagg

SEQ ID NO: 5239 - DNA, 25 bp, artificial sequence
  antisense probe sequence
gctgtaatgcagtttaatcagagtg

SEQ ID NO: 5240 - DNA, 25 bp, artificial sequence
  antisense probe sequence
cactactgctgcagctcacaaacac

SEQ ID NO: 5241 - DNA, 25 bp, artificial sequence
  antisense probe sequence
gctcacaaacacctctgcatattac

SEQ ID NO: 5242 - DNA, 25 bp, artificial sequence
  antisense probe sequence
tctgcatattacatgtacctcctcc

SEQ ID NO: 5243 - DNA, 25 bp, artificial sequence
  antisense probe sequence
gtgtggtctattttgccatcatcac

SEQ ID NO: 5244 - DNA, 25 bp, artificial sequence
  antisense probe sequence
ggccatttcagttctcatgtgtgta

SEQ ID NO: 5245 - DNA, 25 bp, artificial sequence
  antisense probe sequence
ggttttcaaaccagtgggcacacag

SEQ ID NO: 5246 - DNA, 25 bp, artificial sequence
  antisense probe sequence
tccctctcttagtgttctttaatca

SEQ ID NO: 5247 - DNA, 25 bp, artificial sequence
  antisense probe sequence
ataactgcctggaagcctttcattt

SEQ ID NO: 5248 - DNA, 25 bp, artificial sequence
  antisense probe sequence
tggaagcctttcattttacacgccc

SEQ ID NO: 5249 - DNA, 25 bp, artificial sequence
  antisense probe sequence
cgccctgaagcagtcttctttgcta

SEQ ID NO: 5250 - DNA, 25 bp, artificial sequence
  antisense probe sequence
ttatgtggtgtgtttttccgtaata

SEQ ID NO: 5251 - DNA, 25 bp, artificial sequence
  antisense probe sequence
ggtctacgcctattacaacctggag

SEQ ID NO: 5252 - DNA, 25 bp, artificial sequence
  antisense probe sequence
aagctctgccgtgatgaactgtgcc

SEQ ID NO: 5253 - DNA, 25 bp, artificial sequence
  antisense probe sequence
gaacggctggacaaggcctgtgagc

SEQ ID NO: 5254 - DNA, 25 bp, artificial sequence
  antisense probe sequence
ggttcagctgtccaatgactttgac

SEQ ID NO: 5255 - DNA, 25 bp, artificial sequence
  antisense probe sequence
gcagaccatcaagtcaggctcggat

SEQ ID NO: 5256 - DNA, 25 bp, artificial sequence
  antisense probe sequence
tcatcagccccatcaagtgcagaga

SEQ ID NO: 5257 - DNA, 25 bp, artificial sequence
  antisense probe sequence
aacactacctcatgtggggtctctc

SEQ ID NO: 5258 - DNA, 25 bp, artificial sequence
  antisense probe sequence
gtctctcctccgatttctggggaga

SEQ ID NO: 5259 - DNA, 25 bp, artificial sequence
  antisense probe sequence
gtggagcactggcctgaggaggacg

SEQ ID NO: 5260 - DNA, 25 bp, artificial sequence
  antisense probe sequence
agaaacaatgccaggacctcggcgc

SEQ ID NO: 5261 - DNA, 25 bp, artificial sequence
  antisense probe sequence
cgccttcaccgagagcatggttgtc

SEQ ID NO: 5262 - DNA, 25 bp, artificial sequence
  antisense probe sequence
aatgtttaattgtttggatctgcac

SEQ ID NO: 5263 - DNA, 25 bp, artificial sequence
  antisense probe sequence
ggatctgcacagtttggtttttgca

SEQ ID NO: 5264 - DNA, 25 bp, artificial sequence
  antisense probe sequence
acagtttttagtcaaagtggccatt

SEQ ID NO: 5265 - DNA, 25 bp, artificial sequence
  antisense probe sequence
aattctttttattggtgcctatatt

SEQ ID NO: 5266 - DNA, 25 bp, artificial sequence
  antisense probe sequence
ttcagttaaatttttcacctgctgt

SEQ ID NO: 5267 - DNA, 25 bp, artificial sequence
  antisense probe sequence
ggagataattttgcaactcatgtta

SEQ ID NO: 5268 - DNA, 25 bp, artificial sequence
  antisense probe sequence
actttacaacacaattgcatcccaa

SEQ ID NO: 5269 - DNA, 25 bp, artificial sequence
  antisense probe sequence
tattcattatagctattcgtcctgt

SEQ ID NO: 5270 - DNA, 25 bp, artificial sequence
  antisense probe sequence
tattcgtcctgtaatctgtttctag

SEQ ID NO: 5271 - DNA, 25 bp, artificial sequence
  antisense probe sequence
gtttctaggtgaagcatactccagt

SEQ ID NO: 5272 - DNA, 25 bp, artificial sequence
  antisense probe sequence
gcatactccagtgttttaggggttt

SEQ ID NO: 5273 - DNA, 25 bp, artificial sequence
  antisense probe sequence
taaatctctggaccctggagcactt

SEQ ID NO: 5274 - DNA, 25 bp, artificial sequence
  antisense probe sequence
tggagcacttctaatgtatcacccc

SEQ ID NO: 5275 - DNA, 25 bp, artificial sequence
  antisense probe sequence
gtatcaccccatggagtcattgttc

SEQ ID NO: 5276 - DNA, 25 bp, artificial sequence
  antisense probe sequence
gactcagatcctcgtggtctatgga

SEQ ID NO: 5277 - DNA, 25 bp, artificial sequence
  antisense probe sequence
tccccttcttcctgatagacttgga

SEQ ID NO: 5278 - DNA, 25 bp, artificial sequence
  antisense probe sequence
tgcctgcctgctgtaaacactattc

SEQ ID NO: 5279 - DNA, 25 bp, artificial sequence
  antisense probe sequence
tctgtctgccaacaactgcttcagg

SEQ ID NO: 5280 - DNA, 25 bp, artificial sequence
  antisense probe sequence
ccttagatagaacctgtcttcctcc

SEQ ID NO: 5281 - DNA, 25 bp, artificial sequence
  antisense probe sequence
ctccctggcattgtggggtctgggc

SEQ ID NO: 5282 - DNA, 25 bp, artificial sequence
  antisense probe sequence
ctttgtgctgccaacctgagattga

SEQ ID NO: 5283 - DNA, 25 bp, artificial sequence
  antisense probe sequence
tatctccgcatttccagttgtatta

SEQ ID NO: 5284 - DNA, 25 bp, artificial sequence
  antisense probe sequence
tgccgtcagccgaactttgttatgg

SEQ ID NO: 5285 - DNA, 25 bp, artificial sequence
  antisense probe sequence
tggagggagcagcctcacacaagca

SEQ ID NO: 5286 - DNA, 25 bp, artificial sequence
  antisense probe sequence
gaaacactcctgtggatggtattgt

SEQ ID NO: 5287 - DNA, 25 bp, artificial sequence
  antisense probe sequence
tagtcaatagaccctctccttataa

SEQ ID NO: 5288 - DNA, 25 bp, artificial sequence
  antisense probe sequence
gcagaggatattggagccccttttt

SEQ ID NO: 5289 - DNA, 25 bp, artificial sequence
  antisense probe sequence
agcccctttttgtgacattaccaat

SEQ ID NO: 5290 - DNA, 25 bp, artificial sequence
  antisense probe sequence
taccaattacatctttgtccacgtt

SEQ ID NO: 5291 - DNA, 25 bp, artificial sequence
  antisense probe sequence
tgtccacgtttaatactttgttttg

SEQ ID NO: 5292 - DNA, 25 bp, artificial sequence
  antisense probe sequence
atgttttccatatactttgtcttgc

SEQ ID NO: 5293 - DNA, 25 bp, artificial sequence
  antisense probe sequence
tactttgtcttgcctgtatgcagcc

SEQ ID NO: 5294 - DNA, 25 bp, artificial sequence
  antisense probe sequence
gtatgcagcccttgtgtaatatggt

SEQ ID NO: 5295 - DNA, 25 bp, artificial sequence
  antisense probe sequence
aacacctgtgctaggtcagtctggc

SEQ ID NO: 5296 - DNA, 25 bp, artificial sequence
  antisense probe sequence
gctaggtcagtctggcacgtaagat

SEQ ID NO: 5297 - DNA, 25 bp, artificial sequence
  antisense probe sequence
gtctggcacgtaagatgaacatccc

SEQ ID NO: 5298 - DNA, 25 bp, artificial sequence
  antisense probe sequence
taagatgaacatccctaccaacaca

SEQ ID NO: 5299 - DNA, 25 bp, artificial sequence
  antisense probe sequence
gagctcaccatctcttatacttaag

SEQ ID NO: 5300 - DNA, 25 bp, artificial sequence
  antisense probe sequence
atgttccctgacacatatcttgaat

SEQ ID NO: 5301 - DNA, 25 bp, artificial sequence
  antisense probe sequence
acatatcttgaatggagacctccct

SEQ ID NO: 5302 - DNA, 25 bp, artificial sequence
  antisense probe sequence
agacctccctaccaagtgatgaaag

SEQ ID NO: 5303 - DNA, 25 bp, artificial sequence
  antisense probe sequence
gggattgaggattatcttctctcag

SEQ ID NO: 5304 - DNA, 25 bp, artificial sequence
  antisense probe sequence
tcttctctcagaaaggcattgtgaa

SEQ ID NO: 5305 - DNA, 25 bp, artificial sequence
  antisense probe sequence
cctactgcaaaaccctattgtagta

SEQ ID NO: 5306 - DNA, 25 bp, artificial sequence
  antisense probe sequence
gaagagaaaaccactaaccttgatt

SEQ ID NO: 5307 - DNA, 25 bp, artificial sequence
  antisense probe sequence
aaccatgatttgcaactgtaacagg

SEQ ID NO: 5308 - DNA, 25 bp, artificial sequence
  antisense probe sequence
gaccatttattataagcgtacctgt

SEQ ID NO: 5309 - DNA, 25 bp, artificial sequence
  antisense probe sequence
aagcgtacctgtttgtgaacttaat

SEQ ID NO: 5310 - DNA, 25 bp, artificial sequence
  antisense probe sequence
gctgtttttgcttaggtgatccact

SEQ ID NO: 5311 - DNA, 25 bp, artificial sequence
  antisense probe sequence
atccactgccatgtgatccataatt

SEQ ID NO: 5312 - DNA, 25 bp, artificial sequence
  antisense probe sequence
gtgatccataatttttctacataaa

SEQ ID NO: 5313 - DNA, 25 bp, artificial sequence
  antisense probe sequence
tctacttgttaatatattcggccca

SEQ ID NO: 5314 - DNA, 25 bp, artificial sequence
  antisense probe sequence
attcggcccatattttgtgtgtttg

SEQ ID NO: 5315 - DNA, 25 bp, artificial sequence
  antisense probe sequence
gtgtgtttggacaagtacatctccc

SEQ ID NO: 5316 - DNA, 25 bp, artificial sequence
  antisense probe sequence
tctcccttttgcctaatgaactttt

SEQ ID NO: 5317 - DNA, 25 bp, artificial sequence
  antisense probe sequence
cattaccaggttactcttgagattt

SEQ ID NO: 5318 - DNA, 25 bp, artificial sequence
  antisense probe sequence
gttagaactctcaaccaagacctga

SEQ ID NO: 5319 - DNA, 25 bp, artificial sequence
  antisense probe sequence
gtatgcaaggtttctgaatctctct

SEQ ID NO: 5320 - DNA, 25 bp, artificial sequence
  antisense probe sequence
gttcaaaaagttcatgtcttctcaa

SEQ ID NO: 5321 - DNA, 25 bp, artificial sequence
  antisense probe sequence
ggaagagcatacggtgacaagtctc

SEQ ID NO: 5322 - DNA, 25 bp, artificial sequence
  antisense probe sequence
acacctgttaatccatcttgagcag

SEQ ID NO: 5323 - DNA, 25 bp, artificial sequence
  antisense probe sequence
atcttgagcaggacagtactataca

SEQ ID NO: 5324 - DNA, 25 bp, artificial sequence
  antisense probe sequence
tattttcttatagccacgttgaagt

SEQ ID NO: 5325 - DNA, 25 bp, artificial sequence
  antisense probe sequence
tacagtgttttttaccagctttata

SEQ ID NO: 5326 - DNA, 25 bp, artificial sequence
  antisense probe sequence
gatgggtctgactatatgcacacac

SEQ ID NO: 5327 - DNA, 25 bp, artificial sequence
  antisense probe sequence
atgcacacacctttgataccatcac

SEQ ID NO: 5328 - DNA, 25 bp, artificial sequence
  antisense probe sequence
ggcagctgcagacaagtggttaact

SEQ ID NO: 5329 - DNA, 25 bp, artificial sequence
  antisense probe sequence
gacaagtggttaactggtttggcag

SEQ ID NO: 5330 - DNA, 25 bp, artificial sequence
  antisense probe sequence
ttggcagaatggcatgttcctgctg

SEQ ID NO: 5331 - DNA, 25 bp, artificial sequence
  antisense probe sequence
gatgggggtattaatgctccctgga

SEQ ID NO: 5332 - DNA, 25 bp, artificial sequence
  antisense probe sequence
gctccctggaaatgctttctacgtc

SEQ ID NO: 5333 - DNA, 25 bp, artificial sequence
  antisense probe sequence
ctacgtcgatagctcagctcctagc

SEQ ID NO: 5334 - DNA, 25 bp, artificial sequence
  antisense probe sequence
tcctagcccttacttgagagcatcc

SEQ ID NO: 5335 - DNA, 25 bp, artificial sequence
  antisense probe sequence
gatgtggccttccaggtattagcac

SEQ ID NO: 5336 - DNA, 25 bp, artificial sequence
  antisense probe sequence
ggccttccaggtattagcacaactt

SEQ ID NO: 5337 - DNA, 25 bp, artificial sequence
  antisense probe sequence
actctggcctgcatggcagaacaag

SEQ ID NO: 5338 - DNA, 25 bp, artificial sequence
  antisense probe sequence
aaatcaaactaatcatgctgctcat

SEQ ID NO: 5339 - DNA, 25 bp, artificial sequence
  antisense probe sequence
ttccccaaaactcaactcctatggc

SEQ ID NO: 5340 - DNA, 25 bp, artificial sequence
  antisense probe sequence
ggcaattatgaactccattttacca

SEQ ID NO: 5341 - DNA, 25 bp, artificial sequence
  antisense probe sequence
aagaacatttaagtgcctcagcatc

SEQ ID NO: 5342 - DNA, 25 bp, artificial sequence
  antisense probe sequence
aagtgcctcagcatctgtatgatat

SEQ ID NO: 5343 - DNA, 25 bp, artificial sequence
  antisense probe sequence
ataggtaccagctgacatgatgtgt

SEQ ID NO: 5344 - DNA, 25 bp, artificial sequence
  antisense probe sequence
gatgtgtcactagctctgtgggatg

SEQ ID NO: 5345 - DNA, 25 bp, artificial sequence
  antisense probe sequence
acatggaacacctgggagtgctgga

SEQ ID NO: 5346 - DNA, 25 bp, artificial sequence
  antisense probe sequence
gtgctggaaatgtactgggatcgaa

SEQ ID NO: 5347 - DNA, 25 bp, artificial sequence
  antisense probe sequence
acatgggcaccggagtaggtcccgt

SEQ ID NO: 5348 - DNA, 25 bp, artificial sequence
  antisense probe sequence
cagtgacgtacatggctctggttct

SEQ ID NO: 5349 - DNA, 25 bp, artificial sequence
  antisense probe sequence
ggttctggacacaaaatctgtactg

SEQ ID NO: 5350 - DNA, 25 bp, artificial sequence
  antisense probe sequence
accaagcctggctttatgtatttat

SEQ ID NO: 5351 - DNA, 25 bp, artificial sequence
  antisense probe sequence
acagaaggttatgcctggctcccag

SEQ ID NO: 5352 - DNA, 25 bp, artificial sequence
  antisense probe sequence
tgggggaggagtcatggtttatttg

SEQ ID NO: 5353 - DNA, 25 bp, artificial sequence
  antisense probe sequence
tgccttagtttcttagcccatgaaa

SEQ ID NO: 5354 - DNA, 25 bp, artificial sequence
  antisense probe sequence
gacccagggactacctcaagggctt

SEQ ID NO: 5355 - DNA, 25 bp, artificial sequence
  antisense probe sequence
ggaagatgcaagagcctttagtacc

SEQ ID NO: 5356 - DNA, 25 bp, artificial sequence
  antisense probe sequence
agagcctttagtaccaaggttctca

SEQ ID NO: 5357 - DNA, 25 bp, artificial sequence
  antisense probe sequence
cccggacagttaaatcagaacctca

SEQ ID NO: 5358 - DNA, 25 bp, artificial sequence
  antisense probe sequence
cagaacctcagacagcaatatgcct

SEQ ID NO: 5359 - DNA, 25 bp, artificial sequence
  antisense probe sequence
atatgccttgagatgccttgaacca

SEQ ID NO: 5360 - DNA, 25 bp, artificial sequence
  antisense probe sequence
gagatgccttgaaccatgcttgaga

SEQ ID NO: 5361 - DNA, 25 bp, artificial sequence
  antisense probe sequence
gaagccttactacaattccaaaaat

SEQ ID NO: 5362 - DNA, 25 bp, artificial sequence
  antisense probe sequence
atcatcatggttggaaatttgggag

SEQ ID NO: 5363 - DNA, 25 bp, artificial sequence
  antisense probe sequence
tatttgtgaacttgttacccttttg

SEQ ID NO: 5364 - DNA, 25 bp, artificial sequence
  antisense probe sequence
gtaatggtggactaattgctgtata

SEQ ID NO: 5365 - DNA, 25 bp, artificial sequence
  antisense probe sequence
tacacggtacttggagcagtcagcc

SEQ ID NO: 5366 - DNA, 25 bp, artificial sequence
  antisense probe sequence
tcacagatactgctttcacttaaat

SEQ ID NO: 5367 - DNA, 25 bp, artificial sequence
  antisense probe sequence
aattctccgataatgctttgctttt

SEQ ID NO: 5368 - DNA, 25 bp, artificial sequence
  antisense probe sequence
gtcactcttgtgtactatctatttt

SEQ ID NO: 5369 - DNA, 25 bp, artificial sequence
  antisense probe sequence
ttgtgtactatctatttttctcctc

SEQ ID NO: 5370 - DNA, 25 bp, artificial sequence
  antisense probe sequence
aagcaataatatctctgttttcatt

SEQ ID NO: 5371 - DNA, 25 bp, artificial sequence
  antisense probe sequence
atctctgttttcatttcagaacatt

SEQ ID NO: 5372 - DNA, 25 bp, artificial sequence
  antisense probe sequence
gcaccttacatatttgatgctcagg

SEQ ID NO: 5373 - DNA, 25 bp, artificial sequence
  antisense probe sequence
ccacccttacatctccatagttggt

SEQ ID NO: 5374 - DNA, 25 bp, artificial sequence
  antisense probe sequence
gttggtacagttagcttgtagcagc

SEQ ID NO: 5375 - DNA, 25 bp, artificial sequence
  antisense probe sequence
atgcctggagatcactgtctgttgg

SEQ ID NO: 5376 - DNA, 25 bp, artificial sequence
  antisense probe sequence
ctgtctgttggtctgatctcagtat

SEQ ID NO: 5377 - DNA, 25 bp, artificial sequence
  antisense probe sequence
cagtatcatactgagacacctcccc

SEQ ID NO: 5378 - DNA, 25 bp, artificial sequence
  antisense probe sequence
cctgagccttacctacttaaattgg

SEQ ID NO: 5379 - DNA, 25 bp, artificial sequence
  antisense probe sequence
gaggcaagttgcaagggagccagag

SEQ ID NO: 5380 - DNA, 25 bp, artificial sequence
  antisense probe sequence
aatttctttggcacattgacttact

SEQ ID NO: 5381 - DNA, 25 bp, artificial sequence
  antisense probe sequence
ggcacattgacttactgatatcttt

SEQ ID NO: 5382 - DNA, 25 bp, artificial sequence
  antisense probe sequence
tattccccggcgcaataaaaatgcc

SEQ ID NO: 5383 - DNA, 25 bp, artificial sequence
  antisense probe sequence
ctaattggttctgcccaatctcctt

SEQ ID NO: 5384 - DNA, 25 bp, artificial sequence
  antisense probe sequence
tgactgggtctagggcacccaggct

SEQ ID NO: 5385 - DNA, 25 bp, artificial sequence
  antisense probe sequence
gattcagctgatttcctaccagcct

SEQ ID NO: 5386 - DNA, 25 bp, artificial sequence
  antisense probe sequence
tatgggctgttcagaggtgcacacc

SEQ ID NO: 5387 - DNA, 25 bp, artificial sequence
  antisense probe sequence
aagagacttggtacgggccaggaag

SEQ ID NO: 5388 - DNA, 25 bp, artificial sequence
  antisense probe sequence
gaatatgtggcagagctcctggaaa

SEQ ID NO: 5389 - DNA, 25 bp, artificial sequence
  antisense probe sequence
taggtggcatttttgtcagctctgt

SEQ ID NO: 5390 - DNA, 25 bp, artificial sequence
  antisense probe sequence
gtcagctctgtggtttattgttggg

SEQ ID NO: 5391 - DNA, 25 bp, artificial sequence
  antisense probe sequence
aaatatccattgttcactacagtga

SEQ ID NO: 5392 - DNA, 25 bp, artificial sequence
  antisense probe sequence
accgtgtactatccacatgcattac

SEQ ID NO: 5393 - DNA, 25 bp, artificial sequence
  antisense probe sequence
attacaaacatttcgcagagctgct

SEQ ID NO: 5394 - DNA, 25 bp, artificial sequence
  antisense probe sequence
gtctccgacacaaagcacttatctc

SEQ ID NO: 5395 - DNA, 25 bp, artificial sequence
  antisense probe sequence
gcacttatctcttaggagattccca

SEQ ID NO: 5396 - DNA, 25 bp, artificial sequence
  antisense probe sequence
agatcttgttcccagggagtgggtc

SEQ ID NO: 5397 - DNA, 25 bp, artificial sequence
  antisense probe sequence
tcctctgagctgtgaatctctcttc

SEQ ID NO: 5398 - DNA, 25 bp, artificial sequence
  antisense probe sequence
aaacacttctagagttgcccattcc

SEQ ID NO: 5399 - DNA, 25 bp, artificial sequence
  antisense probe sequence
gcccattcctgttatgttcttggac

SEQ ID NO: 5400 - DNA, 25 bp, artificial sequence
  antisense probe sequence
gttcttggaccctaagatacctcct

SEQ ID NO: 5401 - DNA, 25 bp, artificial sequence
  antisense probe sequence
ttgaagccctcaatatttgttggag

SEQ ID NO: 5402 - DNA, 25 bp, artificial sequence
  antisense probe sequence
gtgcaagagaggtcctgtacagatc

SEQ ID NO: 5403 - DNA, 25 bp, artificial sequence
  antisense probe sequence
tctcctttctcctttggaataactt

SEQ ID NO: 5404 - DNA, 25 bp, artificial sequence
  antisense probe sequence
ccacaggtcccactctagtgaaggt

SEQ ID NO: 5405 - DNA, 25 bp, artificial sequence
  antisense probe sequence
acatctgctagaaccttttgcctta

SEQ ID NO: 5406 - DNA, 25 bp, artificial sequence
  antisense probe sequence
ccttttgccttaactattcaccaat

SEQ ID NO: 5407 - DNA, 25 bp, artificial sequence
  antisense probe sequence
attagaatcttgtcttggttccatt

SEQ ID NO: 5408 - DNA, 25 bp, artificial sequence
  antisense probe sequence
gatggctaatatttgttatcttaat

SEQ ID NO: 5409 - DNA, 25 bp, artificial sequence
  antisense probe sequence
atttctgaggtcatgattacttgaa

SEQ ID NO: 5410 - DNA, 25 bp, artificial sequence
  antisense probe sequence
atattgactaaaactgggtccttag

SEQ ID NO: 5411 - DNA, 25 bp, artificial sequence
  antisense probe sequence
gggtccttagaaattccaggtggag

SEQ ID NO: 5412 - DNA, 25 bp, artificial sequence
  antisense probe sequence
gtggagctgatttacctatgactga

SEQ ID NO: 5413 - DNA, 25 bp, artificial sequence
  antisense probe sequence
aattaatgacacatctgttcaataa

SEQ ID NO: 5414 - DNA, 25 bp, artificial sequence
  antisense probe sequence
gtaatgtcatcacaataagctcttg

SEQ ID NO: 5415 - DNA, 25 bp, artificial sequence
  antisense probe sequence
aattaggtttatgtttcatgtcttt

SEQ ID NO: 5416 - DNA, 25 bp, artificial sequence
  antisense probe sequence
tgcttttggtgcgatggcactcact

SEQ ID NO: 5417 - DNA, 25 bp, artificial sequence
  antisense probe sequence
gcaatattgtttccaatactttcta

SEQ ID NO: 5418 - DNA, 25 bp, artificial sequence
  antisense probe sequence
gtgtggtgattgttcaggtcgaatc

SEQ ID NO: 5419 - DNA, 25 bp, artificial sequence
  antisense probe sequence
aggtcgaatctgttgtatccagtac

SEQ ID NO: 5420 - DNA, 25 bp, artificial sequence
  antisense probe sequence
atccagtacagctttaggtcttcag

SEQ ID NO: 5421 - DNA, 25 bp, artificial sequence
  antisense probe sequence
ctgcccttctggcgagtacatgcac

SEQ ID NO: 5422 - DNA, 25 bp, artificial sequence
  antisense probe sequence
tgcagtcatatttccagtctgcctc

SEQ ID NO: 5423 - DNA, 25 bp, artificial sequence
  antisense probe sequence
tccagtctgcctctatgatgatgtt

SEQ ID NO: 5424 - DNA, 25 bp, artificial sequence
  antisense probe sequence
gaacaagggatgtaccactggagga

SEQ ID NO: 5425 - DNA, 25 bp, artificial sequence
  antisense probe sequence
gagtatccttttgtacacattttga

SEQ ID NO: 5426 - DNA, 25 bp, artificial sequence
  antisense probe sequence
aatgcttcttctgtagtgatagaac

SEQ ID NO: 5427 - DNA, 25 bp, artificial sequence
  antisense probe sequence
ttcccaggattctctttgggggtca

SEQ ID NO: 5428 - DNA, 25 bp, artificial sequence
  antisense probe sequence
gaaacagtttcagatcctgccagga

SEQ ID NO: 5429 - DNA, 25 bp, artificial sequence
  antisense probe sequence
cagtacgtatctaagatgctgacac

SEQ ID NO: 5430 - DNA, 25 bp, artificial sequence
  antisense probe sequence
gctaatgtgacttttcagcttatca

SEQ ID NO: 5431 - DNA, 25 bp, artificial sequence
  antisense probe sequence
aaaggtgtggttagatgttttctca

SEQ ID NO: 5432 - DNA, 25 bp, artificial sequence
  antisense probe sequence
cattaatttatcactgagtctcatt

SEQ ID NO: 5433 - DNA, 25 bp, artificial sequence
  antisense probe sequence
gagtctcattcaaccaagtaatcta

SEQ ID NO: 5434 - DNA, 25 bp, artificial sequence
  antisense probe sequence
gcaaattctagcagtatgtcttcga

SEQ ID NO: 5435 - DNA, 25 bp, artificial sequence
  antisense probe sequence
gtatgtcttcgataacttggatgtt

SEQ ID NO: 5436 - DNA, 25 bp, artificial sequence
  antisense probe sequence
agtattttgtcctatgtataacaca

SEQ ID NO: 5437 - DNA, 25 bp, artificial sequence
  antisense probe sequence
aattctggtaattcatactatttct

SEQ ID NO: 5438 - DNA, 25 bp, artificial sequence
  antisense probe sequence
tgttgcatttttcactcttaacccg

SEQ ID NO: 5439 - DNA, 25 bp, artificial sequence
  antisense probe sequence
gtgtgtttcagcttatgttcgttct

SEQ ID NO: 5440 - DNA, 25 bp, artificial sequence
  antisense probe sequence
gaaggcggcttctgatttttagggt

SEQ ID NO: 5441 - DNA, 25 bp, artificial sequence
  antisense probe sequence
tgaggggttcagacacccagtctcc

SEQ ID NO: 5442 - DNA, 25 bp, artificial sequence
  antisense probe sequence
tgaggggtcgactgagctttgttga

SEQ ID NO: 5443 - DNA, 25 bp, artificial sequence
  antisense probe sequence
gcgggtctccatgttatattgtgtg

SEQ ID NO: 5444 - DNA, 25 bp, artificial sequence
  antisense probe sequence
ttgtgtgtttactgagcttcccact

SEQ ID NO: 5445 - DNA, 25 bp, artificial sequence
  antisense probe sequence
gatgacacatttgtccatcgtcctg

SEQ ID NO: 5446 - DNA, 25 bp, artificial sequence
  antisense probe sequence
tctgctttccagaggacaccggagc

SEQ ID NO: 5447 - DNA, 25 bp, artificial sequence
  antisense probe sequence
gctgcctcacatagctgttttgcaa

SEQ ID NO: 5448 - DNA, 25 bp, artificial sequence
  antisense probe sequence
agaatgtacatagtccctttggcca

SEQ ID NO: 5449 - DNA, 25 bp, artificial sequence
  antisense probe sequence
gcctgcgtaagtgaggaaacagctg

SEQ ID NO: 5450 - DNA, 25 bp, artificial sequence
  antisense probe sequence
tgaggaaacagctgatcctgctcct

SEQ ID NO: 5451 - DNA, 25 bp, artificial sequence
  antisense probe sequence
ctcagcgaccgaccagtgacaatga

SEQ ID NO: 5452 - DNA, 25 bp, artificial sequence
  antisense probe sequence
accagtgacaatgacaggagctccc

SEQ ID NO: 5453 - DNA, 25 bp, artificial sequence
  antisense probe sequence
gtgacaatgacaggagctcccaggc

SEQ ID NO: 5454 - DNA, 25 bp, artificial sequence
  antisense probe sequence
ctgccctgggttctaagtactggac

SEQ ID NO: 5455 - DNA, 25 bp, artificial sequence
  antisense probe sequence
gccctgggttctaagtactggacac

SEQ ID NO: 5456 - DNA, 25 bp, artificial sequence
  antisense probe sequence
gggttctaagtactggacaccagcc

SEQ ID NO: 5457 - DNA, 25 bp, artificial sequence
  antisense probe sequence
cacggctggctgcagcgtcaagaga

SEQ ID NO: 5458 - DNA, 25 bp, artificial sequence
  antisense probe sequence
gctggctgcagcgtcaagagagttt

SEQ ID NO: 5459 - DNA, 25 bp, artificial sequence
  antisense probe sequence
gctgcagcgtcaagagagtttgtaa

SEQ ID NO: 5460 - DNA, 25 bp, artificial sequence
  antisense probe sequence
aggagttggtggagctgatagagaa

SEQ ID NO: 5461 - DNA, 25 bp, artificial sequence
  antisense probe sequence
ggtgcagtgcaacgaaggggcttac

SEQ ID NO: 5462 - DNA, 25 bp, artificial sequence
  antisense probe sequence
tgcaacgaaggggcttacttttctg

SEQ ID NO: 5463 - DNA, 25 bp, artificial sequence
  antisense probe sequence
ttctgatgacatatacaaggacaca

SEQ ID NO: 5464 - DNA, 25 bp, artificial sequence
  antisense probe sequence
gaggaaaatctacactgaccaatta

SEQ ID NO: 5465 - DNA, 25 bp, artificial sequence
  antisense probe sequence
ataggatttggaagatgctttcaga

SEQ ID NO: 5466 - DNA, 25 bp, artificial sequence
  antisense probe sequence
gaaatatggcataggtttttgtcga

SEQ ID NO: 5467 - DNA, 25 bp, artificial sequence
  antisense probe sequence
ggcataggtttttgtcgaaatgtaa

SEQ ID NO: 5468 - DNA, 25 bp, artificial sequence
  antisense probe sequence
ttttattcttcctaatttactgtga

SEQ ID NO: 5469 - DNA, 25 bp, artificial sequence
  antisense probe sequence
tcttcctaatttactgtgatttgtt

SEQ ID NO: 5470 - DNA, 25 bp, artificial sequence
  antisense probe sequence
gatagttagagaaatacctccttcc

SEQ ID NO: 5471 - DNA, 25 bp, artificial sequence
  antisense probe sequence
gggagaaacacatttactccccaat

SEQ ID NO: 5472 - DNA, 25 bp, artificial sequence
  antisense probe sequence
ctacatgaccatgcacccagtttgg

SEQ ID NO: 5473 - DNA, 25 bp, artificial sequence
  antisense probe sequence
aggtcagatcggaacaactcacttg

SEQ ID NO: 5474 - DNA, 25 bp, artificial sequence
  antisense probe sequence
gaatggagagtcccttcatctcagc

SEQ ID NO: 5475 - DNA, 25 bp, artificial sequence
  antisense probe sequence
tcagcagcggtggagactctctcct

SEQ ID NO: 5476 - DNA, 25 bp, artificial sequence
  antisense probe sequence
ctctaccagtgatttcagactcccg

SEQ ID NO: 5477 - DNA, 25 bp, artificial sequence
  antisense probe sequence
gatggagaatttggagcctggcaga

SEQ ID NO: 5478 - DNA, 25 bp, artificial sequence
  antisense probe sequence
agagactggacagctctggaggaac

SEQ ID NO: 5479 - DNA, 25 bp, artificial sequence
  antisense probe sequence
tctggaggaacaggcctgctgaggg

SEQ ID NO: 5480 - DNA, 25 bp, artificial sequence
  antisense probe sequence
ggcctctggagtgggacactggccc

SEQ ID NO: 5481 - DNA, 25 bp, artificial sequence
  antisense probe sequence
cctgtgggcagggttcttagtggat

SEQ ID NO: 5482 - DNA, 25 bp, artificial sequence
  antisense probe sequence
cacacgcagatcctgcactgtactg

SEQ ID NO: 5483 - DNA, 25 bp, artificial sequence
  antisense probe sequence
atcctgcactgtactgtccagtcaa

SEQ ID NO: 5484 - DNA, 25 bp, artificial sequence
  antisense probe sequence
actgtccagtcaactgacttcagca

SEQ ID NO: 5485 - DNA, 25 bp, artificial sequence
  antisense probe sequence
gatgtctgggttcagcagcgagttg

SEQ ID NO: 5486 - DNA, 25 bp, artificial sequence
  antisense probe sequence
gagttgctgtgtgaggccaccagaa

SEQ ID NO: 5487 - DNA, 25 bp, artificial sequence
  antisense probe sequence
gggagacattcagaatcgaggcgaa

SEQ ID NO: 5488 - DNA, 25 bp, artificial sequence
  antisense probe sequence
cctcagtgctcctcttggaggcaga

SEQ ID NO: 5489 - DNA, 25 bp, artificial sequence
  antisense probe sequence
gtgaatgtggaagaccagcagattg

SEQ ID NO: 5490 - DNA, 25 bp, artificial sequence
  antisense probe sequence
gtggtgaagtggccctgcacaaaac

SEQ ID NO: 5491 - DNA, 25 bp, artificial sequence
  antisense probe sequence
aagtggccctgcacaaaacgttgct

SEQ ID NO: 5492 - DNA, 25 bp, artificial sequence
  antisense probe sequence
tagtaaagctaagttttatctcttc

SEQ ID NO: 5493 - DNA, 25 bp, artificial sequence
  antisense probe sequence
gagacttcattggtgatacactcaa

SEQ ID NO: 5494 - DNA, 25 bp, artificial sequence
  antisense probe sequence
gtgatacactcaatttttactgggt

SEQ ID NO: 5495 - DNA, 25 bp, artificial sequence
  antisense probe sequence
gctaataatgttggtcactgtctca

SEQ ID NO: 5496 - DNA, 25 bp, artificial sequence
  antisense probe sequence
cacaaagcttttgggtaaccagcgt

SEQ ID NO: 5497 - DNA, 25 bp, artificial sequence
  antisense probe sequence
gggtaaccagcgttcttaaatgtat

SEQ ID NO: 5498 - DNA, 25 bp, artificial sequence
  antisense probe sequence
tatggtttttgaccaggtgaaccct

SEQ ID NO: 5499 - DNA, 25 bp, artificial sequence
  antisense probe sequence
gaccaggtgaaccctttagaagtga

SEQ ID NO: 5500 - DNA, 25 bp, artificial sequence
  antisense probe sequence
aaatacctttggctgtgatgaatgt

SEQ ID NO: 5501 - DNA, 25 bp, artificial sequence
  antisense probe sequence
tgaatgtagatcccagcagaatacc

SEQ ID NO: 5502 - DNA, 25 bp, artificial sequence
  antisense probe sequence
ttgactgagtatttgtagatgctta

SEQ ID NO: 5503 - DNA, 25 bp, artificial sequence
  antisense probe sequence
aagttctcaggtactgttcaattat

SEQ ID NO: 5504 - DNA, 25 bp, artificial sequence
  antisense probe sequence
tgaagaaagttctcctcctgatcac

SEQ ID NO: 5505 - DNA, 25 bp, artificial sequence
  antisense probe sequence
ctcctgatcacagccatcttggcag

SEQ ID NO: 5506 - DNA, 25 bp, artificial sequence
  antisense probe sequence
ccatcttggcagtggctgttggttt

SEQ ID NO: 5507 - DNA, 25 bp, artificial sequence
  antisense probe sequence
gacagcgatgaattagcttcagggt

SEQ ID NO: 5508 - DNA, 25 bp, artificial sequence
  antisense probe sequence
tccaccaattccatttccaagattt

SEQ ID NO: 5509 - DNA, 25 bp, artificial sequence
  antisense probe sequence
aagatttccatggtttagacgtaat

SEQ ID NO: 5510 - DNA, 25 bp, artificial sequence
  antisense probe sequence
tagacgtaattttcctattccaata

SEQ ID NO: 5511 - DNA, 25 bp, artificial sequence
  antisense probe sequence
ctattccaatacctgaatctgcccc

SEQ ID NO: 5512 - DNA, 25 bp, artificial sequence
  antisense probe sequence
aaagtcacgataaacctggtcacct

SEQ ID NO: 5513 - DNA, 25 bp, artificial sequence
  antisense probe sequence
aaatagcacacagcattctctagtc

SEQ ID NO: 5514 - DNA, 25 bp, artificial sequence
  antisense probe sequence
atatctttagtgatcttctttaata

SEQ ID NO: 5515 - DNA, 25 bp, artificial sequence
  antisense probe sequence
atttttcttagctaaatctggcaac

SEQ ID NO: 5516 - DNA, 25 bp, artificial sequence
  antisense probe sequence
agcagaatctgccatatgagtaata

SEQ ID NO: 5517 - DNA, 25 bp, artificial sequence
  antisense probe sequence
gagtaatagaagtgagcaggcccag

SEQ ID NO: 5518 - DNA, 25 bp, artificial sequence
  antisense probe sequence
caggactccctaagtcaagaaacca

SEQ ID NO: 5519 - DNA, 25 bp, artificial sequence
  antisense probe sequence
agaaaccaagaggcgtcattacgga

SEQ ID NO: 5520 - DNA, 25 bp, artificial sequence
  antisense probe sequence
aaagagtaactcaccctgtgtgctc

SEQ ID NO: 5521 - DNA, 25 bp, artificial sequence
  antisense probe sequence
agcgatgcccccatgttatgaatgg

SEQ ID NO: 5522 - DNA, 25 bp, artificial sequence
  antisense probe sequence
ggaaaagttcactgaagggttcata

SEQ ID NO: 5523 - DNA, 25 bp, artificial sequence
  antisense probe sequence
ttggataccttcaagggatcagaaa

SEQ ID NO: 5524 - DNA, 25 bp, artificial sequence
  antisense probe sequence
tcatcattactctctacattattat

SEQ ID NO: 5525 - DNA, 25 bp, artificial sequence
  antisense probe sequence
ttttaacttgtctgcatgtttgaaa

SEQ ID NO: 5526 - DNA, 25 bp, artificial sequence
  antisense probe sequence
gcacgtccaaggtgatcctgagggc

SEQ ID NO: 5527 - DNA, 25 bp, artificial sequence
  antisense probe sequence
caccctgaagaaggctgtttccacc

SEQ ID NO: 5528 - DNA, 25 bp, artificial sequence
  antisense probe sequence
gacatggcccgaaatgcctatcact

SEQ ID NO: 5529 - DNA, 25 bp, artificial sequence
  antisense probe sequence
gcctatcacttcaagcgtgtgctca

SEQ ID NO: 5530 - DNA, 25 bp, artificial sequence
  antisense probe sequence
ctccaagtccaagctcaaggtcaag

SEQ ID NO: 5531 - DNA, 25 bp, artificial sequence
  antisense probe sequence
gacagcacaggtcactactgggctc

SEQ ID NO: 5532 - DNA, 25 bp, artificial sequence
  antisense probe sequence
tactgggctccaaacaggggcacaa

SEQ ID NO: 5533 - DNA, 25 bp, artificial sequence
  antisense probe sequence
caagcggcttatcaagggggttcga

SEQ ID NO: 5534 - DNA, 25 bp, artificial sequence
  antisense probe sequence
gggttcgaagggtggccaagtgcca

SEQ ID NO: 5535 - DNA, 25 bp, artificial sequence
  antisense probe sequence
atgaggcaggccaggcaagcagtca

SEQ ID NO: 5536 - DNA, 25 bp, artificial sequence
  antisense probe sequence
cgccattggctcagtgcagtgggaa

SEQ ID NO: 5537 - DNA, 25 bp, artificial sequence
  antisense probe sequence
ggctcaaataccatacctcagaaaa

SEQ ID NO: 5538 - DNA, 25 bp, artificial sequence
  antisense probe sequence
gaaacagtctttgcagctgtgtgac

SEQ ID NO: 5539 - DNA, 25 bp, artificial sequence
  antisense probe sequence
gcagctgtgtgacaagtcactctac

SEQ ID NO: 5540 - DNA, 25 bp, artificial sequence
  antisense probe sequence
acaagtcactctactacatactgat

SEQ ID NO: 5541 - DNA, 25 bp, artificial sequence
  antisense probe sequence
actgatttggagacctccgctaaat

SEQ ID NO: 5542 - DNA, 25 bp, artificial sequence
  antisense probe sequence
gacctccgctaaatagttttatcac

SEQ ID NO: 5543 - DNA, 25 bp, artificial sequence
  antisense probe sequence
actgcagactaaaatgtgggacttg

SEQ ID NO: 5544 - DNA, 25 bp, artificial sequence
  antisense probe sequence
aaaggtttgtactgtctgagtgcac

SEQ ID NO: 5545 - DNA, 25 bp, artificial sequence
  antisense probe sequence
gtctgagtgcacagctactggaata

SEQ ID NO: 5546 - DNA, 25 bp, artificial sequence
  antisense probe sequence
ttagggaatctcaggaacaagcata

SEQ ID NO: 5547 - DNA, 25 bp, artificial sequence
  antisense probe sequence
gtaagtgcagtttttaattctgtat

SEQ ID NO: 5548 - DNA, 25 bp, artificial sequence
  antisense probe sequence
acataccttgggttgatccacttag

SEQ ID NO: 5549 - DNA, 25 bp, artificial sequence
  antisense probe sequence
gatccacttaggaacctcagataat

SEQ ID NO: 5550 - DNA, 25 bp, artificial sequence
  antisense probe sequence
aacatctgccacgtatagagcaatt

SEQ ID NO: 5551 - DNA, 25 bp, artificial sequence
  antisense probe sequence
tatgtcccaggcactctactagaca

SEQ ID NO: 5552 - DNA, 25 bp, artificial sequence
  antisense probe sequence
ctactagacacttcatacagtttag

SEQ ID NO: 5553 - DNA, 25 bp, artificial sequence
  antisense probe sequence
gggtgtagatcaaggcaggagcagg

SEQ ID NO: 5554 - DNA, 25 bp, artificial sequence
  antisense probe sequence
gatgggggctattatgaactgagaa

SEQ ID NO: 5555 - DNA, 25 bp, artificial sequence
  antisense probe sequence
ttggggccaaatcatgtagactctt

SEQ ID NO: 5556 - DNA, 25 bp, artificial sequence
  antisense probe sequence
tagactcttgagtgatgtgttaagg

SEQ ID NO: 5557 - DNA, 25 bp, artificial sequence
  antisense probe sequence
ggaatgctatgagtgctgagagggc

SEQ ID NO: 5558 - DNA, 25 bp, artificial sequence
  antisense probe sequence
gcatcagaagtccttgagagcctcc

SEQ ID NO: 5559 - DNA, 25 bp, artificial sequence
  antisense probe sequence
caagctaaaagagaacctcaggcca

SEQ ID NO: 5560 - DNA, 25 bp, artificial sequence
  antisense probe sequence
gaacctcaggccaatgatcgagcgg

SEQ ID NO: 5561 - DNA, 25 bp, artificial sequence
  antisense probe sequence
ggccaatgatcgagcggaaaattcc

SEQ ID NO: 5562 - DNA, 25 bp, artificial sequence
  antisense probe sequence
ggaaaattccagaactgtacaagcc

SEQ ID NO: 5563 - DNA, 25 bp, artificial sequence
  antisense probe sequence
gtacaagccaatattcagagttgag

SEQ ID NO: 5564 - DNA, 25 bp, artificial sequence
  antisense probe sequence
agaacattgtgctgtctgtcagcat

SEQ ID NO: 5565 - DNA, 25 bp, artificial sequence
  antisense probe sequence
gctgtctgtcagcatatgtatatca

SEQ ID NO: 5566 - DNA, 25 bp, artificial sequence
  antisense probe sequence
gtcagcatatgtatatcagctacaa

SEQ ID NO: 5567 - DNA, 25 bp, artificial sequence
  antisense probe sequence
atatattcaactttgacttcttttg

SEQ ID NO: 5568 - DNA, 25 bp, artificial sequence
  antisense probe sequence
ttaatatgactgtgaccttgactga

SEQ ID NO: 5569 - DNA, 25 bp, artificial sequence
  antisense probe sequence
tatgactgtgaccttgactgataat

SEQ ID NO: 5570 - DNA, 25 bp, artificial sequence
  antisense probe sequence
accctgcactcccaaagattttgtg

SEQ ID NO: 5571 - DNA, 25 bp, artificial sequence
  antisense probe sequence
agattttgtgcagatgggtagttcc

SEQ ID NO: 5572 - DNA, 25 bp, artificial sequence
  antisense probe sequence
gtgacttacttcatgaccagaacta

SEQ ID NO: 5573 - DNA, 25 bp, artificial sequence
  antisense probe sequence
ggggtataaacatcttgcttaacca

SEQ ID NO: 5574 - DNA, 25 bp, artificial sequence
  antisense probe sequence
agacttgctgcctaaaggagcccac

SEQ ID NO: 5575 - DNA, 25 bp, artificial sequence
  antisense probe sequence
tgcctaaaggagcccaccattttac

SEQ ID NO: 5576 - DNA, 25 bp, artificial sequence
  antisense probe sequence
acttttcacatttaatctgccacgt

SEQ ID NO: 5577 - DNA, 25 bp, artificial sequence
  antisense probe sequence
ttaatctgccacgttgaatcaattg

SEQ ID NO: 5578 - DNA, 25 bp, artificial sequence
  antisense probe sequence
aaacctgactcgcaggtgactggac

SEQ ID NO: 5579 - DNA, 25 bp, artificial sequence
  antisense probe sequence
ggtgactggacaggaaatcccaaag

SEQ ID NO: 5580 - DNA, 25 bp, artificial sequence
  antisense probe sequence
caaagttccaccatttctatgctta

SEQ ID NO: 5581 - DNA, 25 bp, artificial sequence
  antisense probe sequence
atttcacggcaaagctttagaggtc

SEQ ID NO: 5582 - DNA, 25 bp, artificial sequence
  antisense probe sequence
tttagaggtctacactgctgcctac

SEQ ID NO: 5583 - DNA, 25 bp, artificial sequence
  antisense probe sequence
tacactgctgcctaccagaatatac

SEQ ID NO: 5584 - DNA, 25 bp, artificial sequence
  antisense probe sequence
aattctctgtatgcaccagattatt

SEQ ID NO: 5585 - DNA, 25 bp, artificial sequence
  antisense probe sequence
gcaaattcaaagtcacctcttcaga

SEQ ID NO: 5586 - DNA, 25 bp, artificial sequence
  antisense probe sequence
acctcttcagagatcactgtcagct

SEQ ID NO: 5587 - DNA, 25 bp, artificial sequence
  antisense probe sequence
actgtcagctaagtgtgtatctgga

SEQ ID NO: 5588 - DNA, 25 bp, artificial sequence
  antisense probe sequence
acaggtatccacttgtcgactaaga

SEQ ID NO: 5589 - DNA, 25 bp, artificial sequence
  antisense probe sequence
ttaagtaaactacacatttccattt

SEQ ID NO: 5590 - DNA, 25 bp, artificial sequence
  antisense probe sequence
gaactttatactcactttgctatgt

SEQ ID NO: 5591 - DNA, 25 bp, artificial sequence
  antisense probe sequence
aagcctcaaagtgaagtccaactgg

SEQ ID NO: 5592 - DNA, 25 bp, artificial sequence
  antisense probe sequence
ataccttcacaatctgaactttctc

SEQ ID NO: 5593 - DNA, 25 bp, artificial sequence
  antisense probe sequence
gaactttctctagatgggcacagat

SEQ ID NO: 5594 - DNA, 25 bp, artificial sequence
  antisense probe sequence
agtgctgaggctttttgcaggcgca

SEQ ID NO: 5595 - DNA, 25 bp, artificial sequence
  antisense probe sequence
tgcaggcgcagttagcaggcgaact

SEQ ID NO: 5596 - DNA, 25 bp, artificial sequence
  antisense probe sequence
ggcgaactggtcagcagggtttctg

SEQ ID NO: 5597 - DNA, 25 bp, artificial sequence
  antisense probe sequence
cgtagatttgcgtgacaggggccct

SEQ ID NO: 5598 - DNA, 25 bp, artificial sequence
  antisense probe sequence
caggggccctgtgttgctaaggaat

SEQ ID NO: 5599 - DNA, 25 bp, artificial sequence
  antisense probe sequence
aaaagtctcagcgtcagacactcct

SEQ ID NO: 5600 - DNA, 25 bp, artificial sequence
  antisense probe sequence
cctttccaggcaactcacagtttag

SEQ ID NO: 5601 - DNA, 25 bp, artificial sequence
  antisense probe sequence
gttgtgtgtgttcaagctcttgggt

SEQ ID NO: 5602 - DNA, 25 bp, artificial sequence
  antisense probe sequence
aacatcttgtcttacagctctttta

SEQ ID NO: 5603 - DNA, 25 bp, artificial sequence
  antisense probe sequence
tgaggcagtgcatgttcttggccca

SEQ ID NO: 5604 - DNA, 25 bp, artificial sequence
  antisense probe sequence
tggcccagagtaagtgcttagtgaa

SEQ ID NO: 5605 - DNA, 25 bp, artificial sequence
  antisense probe sequence
agtgaatgctttctaactccgaacc

SEQ ID NO: 5606 - DNA, 25 bp, artificial sequence
  antisense probe sequence
gggtgttgagcaaaaggggccttca

SEQ ID NO: 5607 - DNA, 25 bp, artificial sequence
  antisense probe sequence
ggggccttcaagatgttcaaggcac

SEQ ID NO: 5608 - DNA, 25 bp, artificial sequence
  antisense probe sequence
ggcctcagtgggtgcatgtgattat

SEQ ID NO: 5609 - DNA, 25 bp, artificial sequence
  antisense probe sequence
tgattatccacgtttcacctatgaa

SEQ ID NO: 5610 - DNA, 25 bp, artificial sequence
  antisense probe sequence
gacagggcctcgattctgttttaaa

SEQ ID NO: 5611 - DNA, 25 bp, artificial sequence
  antisense probe sequence
tctgttttaaactccagtagtccct

SEQ ID NO: 5612 - DNA, 25 bp, artificial sequence
  antisense probe sequence
cctccattaccgtcactggtgaaat

SEQ ID NO: 5613 - DNA, 25 bp, artificial sequence
  antisense probe sequence
actggtgaaatgcggctcacctccc

SEQ ID NO: 5614 - DNA, 25 bp, artificial sequence
  antisense probe sequence
atgtcaggtttgtacctaccacatt

SEQ ID NO: 5615 - DNA, 25 bp, artificial sequence
  antisense probe sequence
ggcacatagtaagtagtcgataggt

SEQ ID NO: 5616 - DNA, 25 bp, artificial sequence
  antisense probe sequence
attgttattttctggagtccaacta

SEQ ID NO: 5617 - DNA, 25 bp, artificial sequence
  antisense probe sequence
gagtccaactaacaaatcccacagt

SEQ ID NO: 5618 - DNA, 25 bp, artificial sequence
  antisense probe sequence
aaatcccacagtgaatgacatcaca

SEQ ID NO: 5619 - DNA, 25 bp, artificial sequence
  antisense probe sequence
gggatgcaaccaacaagatccagaa

SEQ ID NO: 5620 - DNA, 25 bp, artificial sequence
  antisense probe sequence
acttctactagataaacaactccat

SEQ ID NO: 5621 - DNA, 25 bp, artificial sequence
  antisense probe sequence
gataaacaactccatttcttcagca

SEQ ID NO: 5622 - DNA, 25 bp, artificial sequence
  antisense probe sequence
gaaccaaatttgtatgaggcaatca

SEQ ID NO: 5623 - DNA, 25 bp, artificial sequence
  antisense probe sequence
aaaactgacaccgactgtattaagg

SEQ ID NO: 5624 - DNA, 25 bp, artificial sequence
  antisense probe sequence
atgagattgctgttatgttttctaa

SEQ ID NO: 5625 - DNA, 25 bp, artificial sequence
  antisense probe sequence
aactagatttttgaccctcactcat

SEQ ID NO: 5626 - DNA, 25 bp, artificial sequence
  antisense probe sequence
ctttccttgctatagacatgctttg

SEQ ID NO: 5627 - DNA, 25 bp, artificial sequence
  antisense probe sequence
agacatgctttgcatacccagcttc

SEQ ID NO: 5628 - DNA, 25 bp, artificial sequence
  antisense probe sequence
ttctagccacatcttccctaagaaa

SEQ ID NO: 5629 - DNA, 25 bp, artificial sequence
  antisense probe sequence
ggatctgcatgttgtcagctaccta

SEQ ID NO: 5630 - DNA, 25 bp, artificial sequence
  antisense probe sequence
gttgtcagctacctaaagcagcaaa

SEQ ID NO: 5631 - DNA, 25 bp, artificial sequence
  antisense probe sequence
taaaatcagggaaccttgcagttta

SEQ ID NO: 5632 - DNA, 25 bp, artificial sequence
  antisense probe sequence
aaccttgcagtttaaggcacacctt

SEQ ID NO: 5633 - DNA, 25 bp, artificial sequence
  antisense probe sequence
tttaatccttcaatgcatccagcca

SEQ ID NO: 5634 - DNA, 25 bp, artificial sequence
  antisense probe sequence
tccttcaatgcatccagccaaaaca

SEQ ID NO: 5635 - DNA, 25 bp, artificial sequence
  antisense probe sequence
taccatccatcaatgcaaggttttt

SEQ ID NO: 5636 - DNA, 25 bp, artificial sequence
  antisense probe sequence
gaaactcatgtgtcctcatggatcg

SEQ ID NO: 5637 - DNA, 25 bp, artificial sequence
  antisense probe sequence
catggatcgtggatgccttcatttc

SEQ ID NO: 5638 - DNA, 25 bp, artificial sequence
  antisense probe sequence
tcagtagagtgacccgcggatggca

SEQ ID NO: 5639 - DNA, 25 bp, artificial sequence
  antisense probe sequence
atggcataaatgcacctccttttct

SEQ ID NO: 5640 - DNA, 25 bp, artificial sequence
  antisense probe sequence
tcttggccttggatctatgggtctg

SEQ ID NO: 5641 - DNA, 25 bp, artificial sequence
  antisense probe sequence
ggattgtggtcatctcctcaatcct

SEQ ID NO: 5642 - DNA, 25 bp, artificial sequence
  antisense probe sequence
gctgaatcaatgtggccgtgggtgg

SEQ ID NO: 5643 - DNA, 25 bp, artificial sequence
  antisense probe sequence
ggccgtgggtgggaacttacataca

SEQ ID NO: 5644 - DNA, 25 bp, artificial sequence
  antisense probe sequence
gactgtctaaacaagggggcctcgc

SEQ ID NO: 5645 - DNA, 25 bp, artificial sequence
  antisense probe sequence
gggcctcgcatggagctgtaaagca

SEQ ID NO: 5646 - DNA, 25 bp, artificial sequence
  antisense probe sequence
gggatacatgggcagtgcttcagac

SEQ ID NO: 5647 - DNA, 25 bp, artificial sequence
  antisense probe sequence
gagagaatcctgcatctaacaattt

SEQ ID NO: 5648 - DNA, 25 bp, artificial sequence
  antisense probe sequence
tatgctgttattccttacctagaga

SEQ ID NO: 5649 - DNA, 25 bp, artificial sequence
  antisense probe sequence
tagagaaacaatttccctccaaagt

SEQ ID NO: 5650 - DNA, 25 bp, artificial sequence
  antisense probe sequence
ttgaggggtctgtttaggccaggcc

SEQ ID NO: 5651 - DNA, 25 bp, artificial sequence
  antisense probe sequence
aggccaggccaacacaagtgaccta

SEQ ID NO: 5652 - DNA, 25 bp, artificial sequence
  antisense probe sequence
tttgctggtgtgtacttagctcaga

SEQ ID NO: 5653 - DNA, 25 bp, artificial sequence
  antisense probe sequence
gttgggtcaactatttctaatggga

SEQ ID NO: 5654 - DNA, 25 bp, artificial sequence
  antisense probe sequence
gggacttttccatttgcatgtacag

SEQ ID NO: 5655 - DNA, 25 bp, artificial sequence
  antisense probe sequence
agtcactggaaactgctgggcagag

SEQ ID NO: 5656 - DNA, 25 bp, artificial sequence
  antisense probe sequence
acactttttccacctgtcagattgg

SEQ ID NO: 5657 - DNA, 25 bp, artificial sequence
  antisense probe sequence
tggggaaaatggcattctcccactt

SEQ ID NO: 5658 - DNA, 25 bp, artificial sequence
  antisense probe sequence
attctgaagccagaccgtctttcct

SEQ ID NO: 5659 - DNA, 25 bp, artificial sequence
  antisense probe sequence
tcgcagctgggcgaggggacttgga

SEQ ID NO: 5660 - DNA, 25 bp, artificial sequence
  antisense probe sequence
ctgggcgaggggacttggaggacag

SEQ ID NO: 5661 - DNA, 25 bp, artificial sequence
  antisense probe sequence
ggggacttggaggacagggtgaagc

SEQ ID NO: 5662 - DNA, 25 bp, artificial sequence
  antisense probe sequence
acttggaggacagggtgaagctgca

SEQ ID NO: 5663 - DNA, 25 bp, artificial sequence
  antisense probe sequence
tgaagctgcagaagacctggggtgg

SEQ ID NO: 5664 - DNA, 25 bp, artificial sequence
  antisense probe sequence
gctgcagaagacctggggtgggatg

SEQ ID NO: 5665 - DNA, 25 bp, artificial sequence
  antisense probe sequence
tagagaggacgccaaggactgggga

SEQ ID NO: 5666 - DNA, 25 bp, artificial sequence
  antisense probe sequence
agaggacgccaaggactggggaagg

SEQ ID NO: 5667 - DNA, 25 bp, artificial sequence
  antisense probe sequence
ggaagttaggaataccttacatcca

SEQ ID NO: 5668 - DNA, 25 bp, artificial sequence
  antisense probe sequence
aggaataccttacatccaatgccca

SEQ ID NO: 5669 - DNA, 25 bp, artificial sequence
  antisense probe sequence
gaaatacacccactctcttggaata

SEQ ID NO: 5670 - DNA, 25 bp, artificial sequence
  antisense probe sequence
atgacgtaccactcagttggaccct

SEQ ID NO: 5671 - DNA, 25 bp, artificial sequence
  antisense probe sequence
gaccctcaagagtcactgctttgtc

SEQ ID NO: 5672 - DNA, 25 bp, artificial sequence
  antisense probe sequence
cgcacgcttccatttgatgcatttg

SEQ ID NO: 5673 - DNA, 25 bp, artificial sequence
  antisense probe sequence
atgtcattgtccttgagaccctaca

SEQ ID NO: 5674 - DNA, 25 bp, artificial sequence
  antisense probe sequence
gagaccctacatgtgcagtttggct

SEQ ID NO: 5675 - DNA, 25 bp, artificial sequence
  antisense probe sequence
tttcctgcaggcttttccatgagta

SEQ ID NO: 5676 - DNA, 25 bp, artificial sequence
  antisense probe sequence
gaacaaatctgtatggcttttcccc

SEQ ID NO: 5677 - DNA, 25 bp, artificial sequence
  antisense probe sequence
gtgaacttgtcctagtatgcttgcc

SEQ ID NO: 5678 - DNA, 25 bp, artificial sequence
  antisense probe sequence
cttgcctcacaaacgttttagccat

SEQ ID NO: 5679 - DNA, 25 bp, artificial sequence
  antisense probe sequence
cttagcctgacagtgtcctgttctc

SEQ ID NO: 5680 - DNA, 25 bp, artificial sequence
  antisense probe sequence
gaaatggcacattttctggatgtga

SEQ ID NO: 5681 - DNA, 25 bp, artificial sequence
  antisense probe sequence
gtacttaccctcataagcattaaaa

SEQ ID NO: 5682 - DNA, 25 bp, artificial sequence
  antisense probe sequence
gaaattccatagaaatgtgcctatc

SEQ ID NO: 5683 - DNA, 25 bp, artificial sequence
  antisense probe sequence
gtgcctatcatgttatactgactca

SEQ ID NO: 5684 - DNA, 25 bp, artificial sequence
  antisense probe sequence
caaaccagaagacctagagtatgat

SEQ ID NO: 5685 - DNA, 25 bp, artificial sequence
  antisense probe sequence
gtggtgggtatgagtggaagtatgt

SEQ ID NO: 5686 - DNA, 25 bp, artificial sequence
  antisense probe sequence
gtgtgtgagatttatcattgccata

SEQ ID NO: 5687 - DNA, 25 bp, artificial sequence
  antisense probe sequence
gagatttatcattgccatagtgtaa

SEQ ID NO: 5688 - DNA, 25 bp, artificial sequence
  antisense probe sequence
gtaaaagagttgaattagcttccac

SEQ ID NO: 5689 - DNA, 25 bp, artificial sequence
  antisense probe sequence
attagcttccacttgactagatgag

SEQ ID NO: 5690 - DNA, 25 bp, artificial sequence
  antisense probe sequence
tagatgagagctcttagttcttatt

SEQ ID NO: 5691 - DNA, 25 bp, artificial sequence
  antisense probe sequence
cccagccgctataacttttaacaat

SEQ ID NO: 5692 - DNA, 25 bp, artificial sequence
  antisense probe sequence
acaattcccatatgtcctttattcc

SEQ ID NO: 5693 - DNA, 25 bp, artificial sequence
  antisense probe sequence
tatgtcctttattccactaagatga

SEQ ID NO: 5694 - DNA, 25 bp, artificial sequence
  antisense probe sequence
atgagtgcagtatatatttccatct

SEQ ID NO: 5695 - DNA, 25 bp, artificial sequence
  antisense probe sequence
atatttccatctgtccaaggcttcc

SEQ ID NO: 5696 - DNA, 25 bp, artificial sequence
  antisense probe sequence
gggcatttggggaatccaggctgtg

SEQ ID NO: 5697 - DNA, 25 bp, artificial sequence
  antisense probe sequence
ccaggctgtgattcagggaagttcc

SEQ ID NO: 5698 - DNA, 25 bp, artificial sequence
  antisense probe sequence
aagttccaagtgtctgatgaagtgt

SEQ ID NO: 5699 - DNA, 25 bp, artificial sequence
  antisense probe sequence
ttgttttacatctttgtgtcccttg

SEQ ID NO: 5700 - DNA, 25 bp, artificial sequence
  antisense probe sequence
ccttgcaggtctagcactgtgctat

SEQ ID NO: 5701 - DNA, 25 bp, artificial sequence
  antisense probe sequence
gtgctatgtaggtaacatgtgctcc

SEQ ID NO: 5702 - DNA, 25 bp, artificial sequence
  antisense probe sequence
taatcggctcactataggaatttgc

SEQ ID NO: 5703 - DNA, 25 bp, artificial sequence
  antisense probe sequence
aagcagctaaaccaaaagaagcctc

SEQ ID NO: 5704 - DNA, 25 bp, artificial sequence
  antisense probe sequence
cagatacaaactggactctcaggac

SEQ ID NO: 5705 - DNA, 25 bp, artificial sequence
  antisense probe sequence
caaactggactctcaggacaaaacg

SEQ ID NO: 5706 - DNA, 25 bp, artificial sequence
  antisense probe sequence
tcaggacaaaacgacaccagccaaa

SEQ ID NO: 5707 - DNA, 25 bp, artificial sequence
  antisense probe sequence
ttccttttcttcgtggccaatgcca

SEQ ID NO: 5708 - DNA, 25 bp, artificial sequence
  antisense probe sequence
ttcttcgtggccaatgccataatcc

SEQ ID NO: 5709 - DNA, 25 bp, artificial sequence
  antisense probe sequence
ttctgcttcagttgaggtgacacgt

SEQ ID NO: 5710 - DNA, 25 bp, artificial sequence
  antisense probe sequence
ttcagttgaggtgacacgtctcagc

SEQ ID NO: 5711 - DNA, 25 bp, artificial sequence
  antisense probe sequence
gtgacacgtctcagccttagccctg

SEQ ID NO: 5712 - DNA, 25 bp, artificial sequence
  antisense probe sequence
ggttgatgccagacatcaccaggtt

SEQ ID NO: 5713 - DNA, 25 bp, artificial sequence
  antisense probe sequence
atcaccaggttgtagaagttgacag

SEQ ID NO: 5714 - DNA, 25 bp, artificial sequence
  antisense probe sequence
caccaggttgtagaagttgacaggc

SEQ ID NO: 5715 - DNA, 25 bp, artificial sequence
  antisense probe sequence
atgtaggggccaagcagtgcccagc

SEQ ID NO: 5716 - DNA, 25 bp, artificial sequence
  antisense probe sequence
tgtaggggccaagcagtgcccagct

SEQ ID NO: 5717 - DNA, 25 bp, artificial sequence
  antisense probe sequence
gtcaataaagttacccttgtacttg

SEQ ID NO: 5718 - DNA, 25 bp, artificial sequence
  antisense probe sequence
actgtggccgacctactatttttat

SEQ ID NO: 5719 - DNA, 25 bp, artificial sequence
  antisense probe sequence
ggttctcagtctgttggcagactgg

SEQ ID NO: 5720 - DNA, 25 bp, artificial sequence
  antisense probe sequence
agtctgttggcagactggagtgcaa

SEQ ID NO: 5721 - DNA, 25 bp, artificial sequence
  antisense probe sequence
agcctggtcccatatcatagtgaaa

SEQ ID NO: 5722 - DNA, 25 bp, artificial sequence
  antisense probe sequence
catatcatagtgaaatggtgcctgt

SEQ ID NO: 5723 - DNA, 25 bp, artificial sequence
  antisense probe sequence
aaatggtgcctgtaaagctctcagc

SEQ ID NO: 5724 - DNA, 25 bp, artificial sequence
  antisense probe sequence
aagctctcagcattggcttggcaca

SEQ ID NO: 5725 - DNA, 25 bp, artificial sequence
  antisense probe sequence
ttggcttggcacatgcagttggtac

SEQ ID NO: 5726 - DNA, 25 bp, artificial sequence
  antisense probe sequence
ggcacatgcagttggtactcaataa

SEQ ID NO: 5727 - DNA, 25 bp, artificial sequence
  antisense probe sequence
ggtactcaataaacggctgttgcta

SEQ ID NO: 5728 - DNA, 25 bp, artificial sequence
  antisense probe sequence
tcaataaacggctgttgctatcccc

SEQ ID NO: 5729 - DNA, 25 bp, artificial sequence
  antisense probe sequence
ttctaagacccacatttggttattg

SEQ ID NO: 5730 - DNA, 25 bp, artificial sequence
  antisense probe sequence
ttggttattgaaggccacagcgaat

SEQ ID NO: 5731 - DNA, 25 bp, artificial sequence
  antisense probe sequence
gcgaatcttaacctaacagccttga

SEQ ID NO: 5732 - DNA, 25 bp, artificial sequence
  antisense probe sequence
cagccttgacaaactgcaccatagg

SEQ ID NO: 5733 - DNA, 25 bp, artificial sequence
  antisense probe sequence
gcaccataggtgtttttagactcat

SEQ ID NO: 5734 - DNA, 25 bp, artificial sequence
  antisense probe sequence
ttagtaactaccattctttgattag

SEQ ID NO: 5735 - DNA, 25 bp, artificial sequence
  antisense probe sequence
gaatgcatatcttactttggttgta

SEQ ID NO: 5736 - DNA, 25 bp, artificial sequence
  antisense probe sequence
ggttgtaaattatcaagggctttct

SEQ ID NO: 5737 - DNA, 25 bp, artificial sequence
  antisense probe sequence
tcacatactgtgtttccagttgtct

SEQ ID NO: 5738 - DNA, 25 bp, artificial sequence
  antisense probe sequence
gtgtttccagttgtcttgatattga

SEQ ID NO: 5739 - DNA, 25 bp, artificial sequence
  antisense probe sequence
tgtaataaacttcatgctcacctat

SEQ ID NO: 5740 - DNA, 25 bp, artificial sequence
  antisense probe sequence
attcctgggctcgagagagccactc

SEQ ID NO: 5741 - DNA, 25 bp, artificial sequence
  antisense probe sequence
gtgattttgccatattagtttacca

SEQ ID NO: 5742 - DNA, 25 bp, artificial sequence
  antisense probe sequence
tttgccatattagtttaccatctgt

SEQ ID NO: 5743 - DNA, 25 bp, artificial sequence
  antisense probe sequence
gtttaccatctgtacaattatttgc

SEQ ID NO: 5744 - DNA, 25 bp, artificial sequence
  antisense probe sequence
ccatctgtacaattatttgctttat

SEQ ID NO: 5745 - DNA, 25 bp, artificial sequence
  antisense probe sequence
ctttaaattggctcattattcactt

SEQ ID NO: 5746 - DNA, 25 bp, artificial sequence
  antisense probe sequence
aattggctcattattcacttaatga

SEQ ID NO: 5747 - DNA, 25 bp, artificial sequence
  antisense probe sequence
gaaattattgcaacaggaatctttt

SEQ ID NO: 5748 - DNA, 25 bp, artificial sequence
  antisense probe sequence
gcaacaggaatcttttgtatcactt

SEQ ID NO: 5749 - DNA, 25 bp, artificial sequence
  antisense probe sequence
gaatcttttgtatcacttctgtaaa

SEQ ID NO: 5750 - DNA, 25 bp, artificial sequence
  antisense probe sequence
gtctcatttgccatcaatagaaggt

SEQ ID NO: 5751 - DNA, 25 bp, artificial sequence
  antisense probe sequence
gaaaattcctggcagtttcaactgt

SEQ ID NO: 5752 - DNA, 25 bp, artificial sequence
  antisense probe sequence
tagacattgctaacctgttctccaa

SEQ ID NO: 5753 - DNA, 25 bp, artificial sequence
  antisense probe sequence
gctgaaccaatttctgtttcctcaa

SEQ ID NO: 5754 - DNA, 25 bp, artificial sequence
  antisense probe sequence
aacatttctgcataaggttctacag

SEQ ID NO: 5755 - DNA, 25 bp, artificial sequence
  antisense probe sequence
tatgaccctttggattatgcctaca

SEQ ID NO: 5756 - DNA, 25 bp, artificial sequence
  antisense probe sequence
aactacattgtacctggccttaggc

SEQ ID NO: 5757 - DNA, 25 bp, artificial sequence
  antisense probe sequence
aaatgaaaccagcttttgccctcag

SEQ ID NO: 5758 - DNA, 25 bp, artificial sequence
  antisense probe sequence
ttttgccctcaggttgatcccatct

SEQ ID NO: 5759 - DNA, 25 bp, artificial sequence
  antisense probe sequence
gatcccatctcctggagttggcaga

SEQ ID NO: 5760 - DNA, 25 bp, artificial sequence
  antisense probe sequence
aaactgtatggttcacattgtgcta

SEQ ID NO: 5761 - DNA, 25 bp, artificial sequence
  antisense probe sequence
ataccgtatgcattatgtcccaggg

SEQ ID NO: 5762 - DNA, 25 bp, artificial sequence
  antisense probe sequence
gattatcaattaccacaccatctcc

SEQ ID NO: 5763 - DNA, 25 bp, artificial sequence
  antisense probe sequence
gaagcatgattggtgcccagttagc

SEQ ID NO: 5764 - DNA, 25 bp, artificial sequence
  antisense probe sequence
cccagttagcctctgcaggatgtgg

SEQ ID NO: 5765 - DNA, 25 bp, artificial sequence
  antisense probe sequence
gtaggagaggttgtctgtggccaga

SEQ ID NO: 5766 - DNA, 25 bp, artificial sequence
  antisense probe sequence
acctatactcactttcccaaattga

SEQ ID NO: 5767 - DNA, 25 bp, artificial sequence
  antisense probe sequence
ttgaatcactgctcacactgctgat

SEQ ID NO: 5768 - DNA, 25 bp, artificial sequence
  antisense probe sequence
tagagtgctgtccggtggagatccc

SEQ ID NO: 5769 - DNA, 25 bp, artificial sequence
  antisense probe sequence
ccacccgaacgtcttatctaatcat

SEQ ID NO: 5770 - DNA, 25 bp, artificial sequence
  antisense probe sequence
atcatgaaactccctagttccttca

SEQ ID NO: 5771 - DNA, 25 bp, artificial sequence
  antisense probe sequence
gttccttcatgtaacttccctgaaa

SEQ ID NO: 5772 - DNA, 25 bp, artificial sequence
  antisense probe sequence
tttgagagtctgtgacccacttacc

SEQ ID NO: 5773 - DNA, 25 bp, artificial sequence
  antisense probe sequence
ttctggctggaacggacgatgcccc

SEQ ID NO: 5774 - DNA, 25 bp, artificial sequence
  antisense probe sequence
ggatcttgttactgaataccacggg

SEQ ID NO: 5775 - DNA, 25 bp, artificial sequence
  antisense probe sequence
ggtgtgtctaagggactggctgaga

SEQ ID NO: 5776 - DNA, 25 bp, artificial sequence
  antisense probe sequence
actacagtgaacgactctgcctcgt

SEQ ID NO: 5777 - DNA, 25 bp, artificial sequence
  antisense probe sequence
gactctgcctcgtcagtgagattcc

SEQ ID NO: 5778 - DNA, 25 bp, artificial sequence
  antisense probe sequence
gttacaccctaaagcctgaaacctg

SEQ ID NO: 5779 - DNA, 25 bp, artificial sequence
  antisense probe sequence
aaccccaatcctctgacagaagaac

SEQ ID NO: 5780 - DNA, 25 bp, artificial sequence
  antisense probe sequence
ggtcctgtagccctaagtggtacta

SEQ ID NO: 5781 - DNA, 25 bp, artificial sequence
  antisense probe sequence
gtggtactaactttccttcattcaa

SEQ ID NO: 5782 - DNA, 25 bp, artificial sequence
  antisense probe sequence
ggctgatttggaattttgtgccccc

SEQ ID NO: 5783 - DNA, 25 bp, artificial sequence
  antisense probe sequence
aattttgtgcccccatgtaagcacc

SEQ ID NO: 5784 - DNA, 25 bp, artificial sequence
  antisense probe sequence
taactctaccctggcactataatgt

SEQ ID NO: 5785 - DNA, 25 bp, artificial sequence
  antisense probe sequence
gctctactgaggtgctatgttctta

SEQ ID NO: 5786 - DNA, 25 bp, artificial sequence
  antisense probe sequence
tcttagtggatgttctgaccctgct

SEQ ID NO: 5787 - DNA, 25 bp, artificial sequence
  antisense probe sequence
tctgaccctgcttcaaatatttccc

SEQ ID NO: 5788 - DNA, 25 bp, artificial sequence
  antisense probe sequence
ggtactaaggaatctttctgctttg

SEQ ID NO: 5789 - DNA, 25 bp, artificial sequence
  antisense probe sequence
gctttggggtttatcagaattctca

SEQ ID NO: 5790 - DNA, 25 bp, artificial sequence
  antisense probe sequence
aatgctctttacttcatggacttcc

SEQ ID NO: 5791 - DNA, 25 bp, artificial sequence
  antisense probe sequence
ttacttcatggacttccactgccat

SEQ ID NO: 5792 - DNA, 25 bp, artificial sequence
  antisense probe sequence
attctttcagtggctacctacatac

SEQ ID NO: 5793 - DNA, 25 bp, artificial sequence
  antisense probe sequence
gctacctacatacaattccaaacac

SEQ ID NO: 5794 - DNA, 25 bp, artificial sequence
  antisense probe sequence
aatgaggtactctcctggaaatatt

SEQ ID NO: 5795 - DNA, 25 bp, artificial sequence
  antisense probe sequence
ggagtttgcattcttattcatcagg

SEQ ID NO: 5796 - DNA, 25 bp, artificial sequence
  antisense probe sequence
gaaagactcaaaaagctgcctggga

SEQ ID NO: 5797 - DNA, 25 bp, artificial sequence
  antisense probe sequence
ggcagatggaacttgagcctgtcaa

SEQ ID NO: 5798 - DNA, 25 bp, artificial sequence
  antisense probe sequence
atccatgtagtagatatcctctgct

SEQ ID NO: 5799 - DNA, 25 bp, artificial sequence
  antisense probe sequence
atcctctgcttaaaaactcactacg

SEQ ID NO: 5800 - DNA, 25 bp, artificial sequence
  antisense probe sequence
aatagcattcgaagatccccagact

SEQ ID NO: 5801 - DNA, 25 bp, artificial sequence
  antisense probe sequence
gatccccagacttcatagaatactc

SEQ ID NO: 5802 - DNA, 25 bp, artificial sequence
  antisense probe sequence
tgtacacatgtatcctttcacacat

SEQ ID NO: 5803 - DNA, 25 bp, artificial sequence
  antisense probe sequence
tttcacacatttgccttgacaaact

SEQ ID NO: 5804 - DNA, 25 bp, artificial sequence
  antisense probe sequence
tgacaaacttctttcactcacatct

SEQ ID NO: 5805 - DNA, 25 bp, artificial sequence
  antisense probe sequence
ggggactctggtatctaattcttta

SEQ ID NO: 5806 - DNA, 25 bp, artificial sequence
  antisense probe sequence
cagccacacgcgaaggtgaccttaa

SEQ ID NO: 5807 - DNA, 25 bp, artificial sequence
  antisense probe sequence
gaccttaaacttttacagctgacgg

SEQ ID NO: 5808 - DNA, 25 bp, artificial sequence
  antisense probe sequence
tatgtgactatccttcatctaccta

SEQ ID NO: 5809 - DNA, 25 bp, artificial sequence
  antisense probe sequence
ggaaccatgtgccaagttgcagggt

SEQ ID NO: 5810 - DNA, 25 bp, artificial sequence
  antisense probe sequence
gactcacaatagtgcatcttggtcc

SEQ ID NO: 5811 - DNA, 25 bp, artificial sequence
  antisense probe sequence
gcatcttggtccgatactctgagag

SEQ ID NO: 5812 - DNA, 25 bp, artificial sequence
  antisense probe sequence
tgctggaagcctccgaggtggaaga

SEQ ID NO: 5813 - DNA, 25 bp, artificial sequence
  antisense probe sequence
tgttgtgcgagggtgttttccgagg

SEQ ID NO: 5814 - DNA, 25 bp, artificial sequence
  antisense probe sequence
aataaatgcggagaccctcgtgggc

SEQ ID NO: 5815 - DNA, 25 bp, artificial sequence
  antisense probe sequence
ctggtgtctatattcttctctcaaa

SEQ ID NO: 5816 - DNA, 25 bp, artificial sequence
  antisense probe sequence
ctctcaaagaaacacctcaactgga

SEQ ID NO: 5817 - DNA, 25 bp, artificial sequence
  antisense probe sequence
cagcccttgcattgcagaggggccc

SEQ ID NO: 5818 - DNA, 25 bp, artificial sequence
  antisense probe sequence
tgaaagaggacaggctaccccttta

SEQ ID NO: 5819 - DNA, 25 bp, artificial sequence
  antisense probe sequence
aaactaaggccctcttgaatctctg

SEQ ID NO: 5820 - DNA, 25 bp, artificial sequence
  antisense probe sequence
gatacaaacatgttcctgggatcac

SEQ ID NO: 5821 - DNA, 25 bp, artificial sequence
  antisense probe sequence
agacaattgttggagagcccctcac

SEQ ID NO: 5822 - DNA, 25 bp, artificial sequence
  antisense probe sequence
atgaggcagacctgactctcttaag

SEQ ID NO: 5823 - DNA, 25 bp, artificial sequence
  antisense probe sequence
aactgctgtcccaaacatgcacttc

SEQ ID NO: 5824 - DNA, 25 bp, artificial sequence
  antisense probe sequence
aaacatgcacttccttgcttaaggt

SEQ ID NO: 5825 - DNA, 25 bp, artificial sequence
  antisense probe sequence
atggtacaagcaatgcctgcccatt

SEQ ID NO: 5826 - DNA, 25 bp, artificial sequence
  antisense probe sequence
tatggtgtacattcttcctgattat

SEQ ID NO: 5827 - DNA, 25 bp, artificial sequence
  antisense probe sequence
cttcctgattattttctacacatac

SEQ ID NO: 5828 - DNA, 25 bp, artificial sequence
  antisense probe sequence
gatcttaaagccacggagaagcctc

SEQ ID NO: 5829 - DNA, 25 bp, artificial sequence
  antisense probe sequence
tgcccttgtttcttgtggagtcagg

SEQ ID NO: 5830 - DNA, 25 bp, artificial sequence
  antisense probe sequence
atgaggcaaagaggcacctcctcca

SEQ ID NO: 5831 - DNA, 25 bp, artificial sequence
  antisense probe sequence
gaaggtccagctcagtggcacaagt

SEQ ID NO: 5832 - DNA, 25 bp, artificial sequence
  antisense probe sequence
gacgggtataatccctgagacccag

SEQ ID NO: 5833 - DNA, 25 bp, artificial sequence
  antisense probe sequence
gacccagattgtgacttgcaatgga

SEQ ID NO: 5834 - DNA, 25 bp, artificial sequence
  antisense probe sequence
agaaagggcaacttactcttcctgg

SEQ ID NO: 5835 - DNA, 25 bp, artificial sequence
  antisense probe sequence
actcttcctggcatcttattgtatt

SEQ ID NO: 5836 - DNA, 25 bp, artificial sequence
  antisense probe sequence
aatctcttactcaacgaacacatct

SEQ ID NO: 5837 - DNA, 25 bp, artificial sequence
  antisense probe sequence
catcttctgatgatttcccaaaatt

SEQ ID NO: 5838 - DNA, 25 bp, artificial sequence
  antisense probe sequence
attgcccaactctatgtttctttga

SEQ ID NO: 5839 - DNA, 25 bp, artificial sequence
  antisense probe sequence
ctttctatattgttatcagtccagg

SEQ ID NO: 5840 - DNA, 25 bp, artificial sequence
  antisense probe sequence
gacattggctctttgtttaggccta

SEQ ID NO: 5841 - DNA, 25 bp, artificial sequence
  antisense probe sequence
gaatttgtgacttagttctgccctt

SEQ ID NO: 5842 - DNA, 25 bp, artificial sequence
  antisense probe sequence
gaaagcagtcttccatcaaatcacc

SEQ ID NO: 5843 - DNA, 25 bp, artificial sequence
  antisense probe sequence
aatgcacggctaaactattcagagt

SEQ ID NO: 5844 - DNA, 25 bp, artificial sequence
  antisense probe sequence
aagtactatgctttaatgcttcttt

SEQ ID NO: 5845 - DNA, 25 bp, artificial sequence
  antisense probe sequence
gcttctttcatcttactagtatggc

SEQ ID NO: 5846 - DNA, 25 bp, artificial sequence
  antisense probe sequence
tatgttattcctctgtgttcacttc

SEQ ID NO: 5847 - DNA, 25 bp, artificial sequence
  antisense probe sequence
acttcgccttgctcttgaaagtgca

SEQ ID NO: 5848 - DNA, 25 bp, artificial sequence
  antisense probe sequence
gtatatcctatacacacatctcctt

SEQ ID NO: 5849 - DNA, 25 bp, artificial sequence
  antisense probe sequence
tgagaagtctacattgcttacattt

SEQ ID NO: 5850 - DNA, 25 bp, artificial sequence
  antisense probe sequence
aaacctctcttagatctggaaccaa

SEQ ID NO: 5851 - DNA, 25 bp, artificial sequence
  antisense probe sequence
agccaccgatccagattcattaaga

SEQ ID NO: 5852 - DNA, 25 bp, artificial sequence
  antisense probe sequence
ttcattaagaccttctgacaccctg

SEQ ID NO: 5853 - DNA, 25 bp, artificial sequence
  antisense probe sequence
acaccctgcgagaagtcactgttac

SEQ ID NO: 5854 - DNA, 25 bp, artificial sequence
  antisense probe sequence
ggggccccttgatctgtaaaggtgt

SEQ ID NO: 5855 - DNA, 25 bp, artificial sequence
  antisense probe sequence
aaaggtgtcttccacgctatagtct

SEQ ID NO: 5856 - DNA, 25 bp, artificial sequence
  antisense probe sequence
gtggtgttgccacaaagcctggaat

SEQ ID NO: 5857 - DNA, 25 bp, artificial sequence
  antisense probe sequence
ggaatctacaccctgttaaccaaga

SEQ ID NO: 5858 - DNA, 25 bp, artificial sequence
  antisense probe sequence
tggatcaaaagcaaccttgtcccgc

SEQ ID NO: 5859 - DNA, 25 bp, artificial sequence
  antisense probe sequence
gtcccgcctcatacaaattaagtta

SEQ ID NO: 5860 - DNA, 25 bp, artificial sequence
  antisense probe sequence
tatggggtccatttttgcacttgta

SEQ ID NO: 5861 - DNA, 25 bp, artificial sequence
  antisense probe sequence
ttgccttgtaattcgacagctctac

SEQ ID NO: 5862 - DNA, 25 bp, artificial sequence
  antisense probe sequence
acttttagtgaccacgggctacatc

SEQ ID NO: 5863 - DNA, 25 bp, artificial sequence
  antisense probe sequence
gggctacatcatatgctttgttcct

SEQ ID NO: 5864 - DNA, 25 bp, artificial sequence
  antisense probe sequence
ataccctcagccagacagaagtcat

SEQ ID NO: 5865 - DNA, 25 bp, artificial sequence
  antisense probe sequence
gaagtcataactgattgctcaacca

SEQ ID NO: 5866 - DNA, 25 bp, artificial sequence
  antisense probe sequence
tgctcaaccaggatttcactcttca

SEQ ID NO: 5867 - DNA, 25 bp, artificial sequence
  antisense probe sequence
aagccaaagaggctacactgctcct

SEQ ID NO: 5868 - DNA, 25 bp, artificial sequence
  antisense probe sequence
tgctttgatcctatcctgtactatc

SEQ ID NO: 5869 - DNA, 25 bp, artificial sequence
  antisense probe sequence
aaagcattccgctcaaaggtcactg

SEQ ID NO: 5870 - DNA, 25 bp, artificial sequence
  antisense probe sequence
tcactgagacttttgcctcacctaa

SEQ ID NO: 5871 - DNA, 25 bp, artificial sequence
  antisense probe sequence
tgctaccaattctggccttactgga

SEQ ID NO: 5872 - DNA, 25 bp, artificial sequence
  antisense probe sequence
gaattgcaaaactgacatcccattt

SEQ ID NO: 5873 - DNA, 25 bp, artificial sequence
  antisense probe sequence
actgacatcccatttcacagcaata

SEQ ID NO: 5874 - DNA, 25 bp, artificial sequence
  antisense probe sequence
cacagcaatagtgacctttatttaa

SEQ ID NO: 5875 - DNA, 25 bp, artificial sequence
  antisense probe sequence
gttgtgttatagtttatgcttctta

SEQ ID NO: 5876 - DNA, 25 bp, artificial sequence
  antisense probe sequence
tttcaacctaaacagccaatttcta

SEQ ID NO: 5877 - DNA, 25 bp, artificial sequence
  antisense probe sequence
acagccaatttctaagcagacagga

SEQ ID NO: 5878 - DNA, 25 bp, artificial sequence
  antisense probe sequence
tattttctagattatccctgtgaat

SEQ ID NO: 5879 - DNA, 25 bp, artificial sequence
  antisense probe sequence
aaatcttaggtttgcttatgcccag

SEQ ID NO: 5880 - DNA, 25 bp, artificial sequence
  antisense probe sequence
gctgtttctcacatctatagtgaca

SEQ ID NO: 5881 - DNA, 25 bp, artificial sequence
  antisense probe sequence
ataggaggggttaaggttcatgaga

SEQ ID NO: 5882 - DNA, 25 bp, artificial sequence
  antisense probe sequence
ggtctgagatgggtgctgcaaagat

SEQ ID NO: 5883 - DNA, 25 bp, artificial sequence
  antisense probe sequence
tagtctaattgaatcccttaaactc

SEQ ID NO: 5884 - DNA, 25 bp, artificial sequence
  antisense probe sequence
atgggatgatcgtgtatttattttt

SEQ ID NO: 5885 - DNA, 25 bp, artificial sequence
  antisense probe sequence
ttttttacttcctcagctgtagaca

SEQ ID NO: 5886 - DNA, 25 bp, artificial sequence
  antisense probe sequence
acttcctcagctgtagacaggtcct

SEQ ID NO: 5887 - DNA, 25 bp, artificial sequence
  antisense probe sequence
gacaggtccttttcgatggtacata

SEQ ID NO: 5888 - DNA, 25 bp, artificial sequence
  antisense probe sequence
tggtacatatttctttgcctttata

SEQ ID NO: 5889 - DNA, 25 bp, artificial sequence
  antisense probe sequence
tataatcttttatacagtgtcttac

SEQ ID NO: 5890 - DNA, 25 bp, artificial sequence
  antisense probe sequence
gtgatgtggcaaatctctattagga

SEQ ID NO: 5891 - DNA, 25 bp, artificial sequence
  antisense probe sequence
atattctgtaatcttcagacctaga

SEQ ID NO: 5892 - DNA, 25 bp, artificial sequence
  antisense probe sequence
aggtttgtgactttcctaaatcaat

SEQ ID NO: 5893 - DNA, 25 bp, artificial sequence
  antisense probe sequence
tacgtgcaatacttcaatacttcat

SEQ ID NO: 5894 - DNA, 25 bp, artificial sequence
  antisense probe sequence
aaaggccacactggtgtgcctggcc

SEQ ID NO: 5895 - DNA, 25 bp, artificial sequence
  antisense probe sequence
tgactccagatactgcctgagcagc

SEQ ID NO: 5896 - DNA, 25 bp, artificial sequence
  antisense probe sequence
tccgctgtcaagtccagttctacgg

SEQ ID NO: 5897 - DNA, 25 bp, artificial sequence
  antisense probe sequence
cgccgaggcctggggtagagcagac

SEQ ID NO: 5898 - DNA, 25 bp, artificial sequence
  antisense probe sequence
tagagcagactgtggctttacctcg

SEQ ID NO: 5899 - DNA, 25 bp, artificial sequence
  antisense probe sequence
ccaccatcctctatgagatcctgct

SEQ ID NO: 5900 - DNA, 25 bp, artificial sequence
  antisense probe sequence
agatcctgctagggaaggccaccat

SEQ ID NO: 5901 - DNA, 25 bp, artificial sequence
  antisense probe sequence
aaggccaccatgtatgctgtgctgg

SEQ ID NO: 5902 - DNA, 25 bp, artificial sequence
  antisense probe sequence
cgcccttgtgttgatggccatggtc

SEQ ID NO: 5903 - DNA, 25 bp, artificial sequence
  antisense probe sequence
agcttctaacccgtcatggtttcaa

SEQ ID NO: 5904 - DNA, 25 bp, artificial sequence
  antisense probe sequence
caatacacattcttcttttgccagc

SEQ ID NO: 5905 - DNA, 25 bp, artificial sequence
  antisense probe sequence
ggaacaagacttcaggtcacgctcg

SEQ ID NO: 5906 - DNA, 25 bp, artificial sequence
  antisense probe sequence
tcaggtcacgctcgatatccagaac

SEQ ID NO: 5907 - DNA, 25 bp, artificial sequence
  antisense probe sequence
tgacaagtctgtctgcctattcacc

SEQ ID NO: 5908 - DNA, 25 bp, artificial sequence
  antisense probe sequence
gagcaacagtgctgtggcctggagc

SEQ ID NO: 5909 - DNA, 25 bp, artificial sequence
  antisense probe sequence
gcatgtgcaaacgccttcaacaaca

SEQ ID NO: 5910 - DNA, 25 bp, artificial sequence
  antisense probe sequence
tccccagcccagaaagttcctgtga

SEQ ID NO: 5911 - DNA, 25 bp, artificial sequence
  antisense probe sequence
gttcctgtgatgtcaagctggtcga

SEQ ID NO: 5912 - DNA, 25 bp, artificial sequence
  antisense probe sequence
cagtgattgggttccgaatcctcct

SEQ ID NO: 5913 - DNA, 25 bp, artificial sequence
  antisense probe sequence
aagtggccgggtttaatctgctcat

SEQ ID NO: 5914 - DNA, 25 bp, artificial sequence
  antisense probe sequence
gctgtggtccagctgagatctgcaa

SEQ ID NO: 5915 - DNA, 25 bp, artificial sequence
  antisense probe sequence
gattgtaagacagcctgtgctccct

SEQ ID NO: 5916 - DNA, 25 bp, artificial sequence
  antisense probe sequence
gccatcagaagcagagatctcccac

SEQ ID NO: 5917 - DNA, 25 bp, artificial sequence
  antisense probe sequence
cctcaatgactccagatactgcctg

SEQ ID NO: 5918 - DNA, 25 bp, artificial sequence
  antisense probe sequence
caatgactccagatactgcctgagc

SEQ ID NO: 5919 - DNA, 25 bp, artificial sequence
  antisense probe sequence
tccgctgtcaagtccagttctacgg

SEQ ID NO: 5920 - DNA, 25 bp, artificial sequence
  antisense probe sequence
ctgtcaagtccagttctacgggctc

SEQ ID NO: 5921 - DNA, 25 bp, artificial sequence
  antisense probe sequence
cagttctacgggctctcggagaatg

SEQ ID NO: 5922 - DNA, 25 bp, artificial sequence
  antisense probe sequence
tcggagaatgacgagtggacccagg

SEQ ID NO: 5923 - DNA, 25 bp, artificial sequence
  antisense probe sequence
aatgacgagtggacccaggataggg

SEQ ID NO: 5924 - DNA, 25 bp, artificial sequence
  antisense probe sequence
ccgaggcctggggtagagcagactg

SEQ ID NO: 5925 - DNA, 25 bp, artificial sequence
  antisense probe sequence
cctggggtagagcagactgtggctt

SEQ ID NO: 5926 - DNA, 25 bp, artificial sequence
  antisense probe sequence
tgatggccatggtcaagagaaagga

SEQ ID NO: 5927 - DNA, 25 bp, artificial sequence
  antisense probe sequence
gtatcaaaatcttccaattatcatg

SEQ ID NO: 5928 - DNA, 25 bp, artificial sequence
  antisense probe sequence
atcttccaattatcatgctcacctg

SEQ ID NO: 5929 - DNA, 25 bp, artificial sequence
  antisense probe sequence
tccaattatcatgctcacctgaaag

SEQ ID NO: 5930 - DNA, 25 bp, artificial sequence
  antisense probe sequence
gctcacctgaaagaggtatgctctc

SEQ ID NO: 5931 - DNA, 25 bp, artificial sequence
  antisense probe sequence
gaggtatgctctcttaggaatacag

SEQ ID NO: 5932 - DNA, 25 bp, artificial sequence
  antisense probe sequence
taggaatacagtttctagcattaaa

SEQ ID NO: 5933 - DNA, 25 bp, artificial sequence
  antisense probe sequence
taataaaatgttcctcgcattcccc

SEQ ID NO: 5934 - DNA, 25 bp, artificial sequence
  antisense probe sequence
agtttcactgtgtagagaacatata

SEQ ID NO: 5935 - DNA, 25 bp, artificial sequence
  antisense probe sequence
ataggtcaattatatgtctccatta

SEQ ID NO: 5936 - DNA, 25 bp, artificial sequence
  antisense probe sequence
aaacatgttctagaactagttacaa

SEQ ID NO: 5937 - DNA, 25 bp, artificial sequence
  antisense probe sequence
aaatatatttggacataacagactt

SEQ ID NO: 5938 - DNA, 25 bp, artificial sequence
  antisense probe sequence
cactgcagaatgaaggaacatccct

SEQ ID NO: 5939 - DNA, 25 bp, artificial sequence
  antisense probe sequence
aaggaacatcccttgaggtgaccca

SEQ ID NO: 5940 - DNA, 25 bp, artificial sequence
  antisense probe sequence
cccagccaacctgtggccagaagga

SEQ ID NO: 5941 - DNA, 25 bp, artificial sequence
  antisense probe sequence
gtaccttgaaaagacactgaaagca

SEQ ID NO: 5942 - DNA, 25 bp, artificial sequence
  antisense probe sequence
gtaagggtgggcagaggaggtagaa

SEQ ID NO: 5943 - DNA, 25 bp, artificial sequence
  antisense probe sequence
atcaattcaattgtcgcatcattca

SEQ ID NO: 5944 - DNA, 25 bp, artificial sequence
  antisense probe sequence
aattgtcgcatcattcatggttctt

SEQ ID NO: 5945 - DNA, 25 bp, artificial sequence
  antisense probe sequence
gtcgcatcattcatggttctttaat

SEQ ID NO: 5946 - DNA, 25 bp, artificial sequence
  antisense probe sequence
ggttctttaatattgatgctcagtg

SEQ ID NO: 5947 - DNA, 25 bp, artificial sequence
  antisense probe sequence
ccttggtcactggtgtttcaaacat

SEQ ID NO: 5948 - DNA, 25 bp, artificial sequence
  antisense probe sequence
ttaagaaagcataaccagcaataaa

SEQ ID NO: 5949 - DNA, 25 bp, artificial sequence
  antisense probe sequence
tgactccagatactgcctgagcagc

SEQ ID NO: 5950 - DNA, 25 bp, artificial sequence
  antisense probe sequence
tccgctgtcaagtccagttctacgg

SEQ ID NO: 5951 - DNA, 25 bp, artificial sequence
  antisense probe sequence
tagagcagactgtggctttacctcg

SEQ ID NO: 5952 - DNA, 25 bp, artificial sequence
  antisense probe sequence
ccaccatcctctatgagatcctgct

SEQ ID NO: 5953 - DNA, 25 bp, artificial sequence
  antisense probe sequence
gagatcctgctagggaaggccaccc

SEQ ID NO: 5954 - DNA, 25 bp, artificial sequence
  antisense probe sequence
caccctgtatgctgtgctggtcagc

SEQ ID NO: 5955 - DNA, 25 bp, artificial sequence
  antisense probe sequence
caatacacattcttcttttgccagc

SEQ ID NO: 5956 - DNA, 25 bp, artificial sequence
  antisense probe sequence
gccagcgcttctgaagagctgctct

SEQ ID NO: 5957 - DNA, 25 bp, artificial sequence
  antisense probe sequence
acctctctgcatcccaatagatatc

SEQ ID NO: 5958 - DNA, 25 bp, artificial sequence
  antisense probe sequence
aatagatatccccctatgtgcatgc

SEQ ID NO: 5959 - DNA, 25 bp, artificial sequence
  antisense probe sequence
gggggaccttagcatgcctaagtga

SEQ ID NO: 5960 - DNA, 25 bp, artificial sequence
  antisense probe sequence
gggaacactgctctcagacattaca

SEQ ID NO: 5961 - DNA, 25 bp, artificial sequence
  antisense probe sequence
gactggacctgggaaaacgcatcct

SEQ ID NO: 5962 - DNA, 25 bp, artificial sequence
  antisense probe sequence
cgcatcctggacccacgaggaatat

SEQ ID NO: 5963 - DNA, 25 bp, artificial sequence
  antisense probe sequence
gaatctaccgtgcaagttcattatc

SEQ ID NO: 5964 - DNA, 25 bp, artificial sequence
  antisense probe sequence
gtgtggagctggatccagccaccgt

SEQ ID NO: 5965 - DNA, 25 bp, artificial sequence
  antisense probe sequence
agactggaaggctgtctggggctgc

SEQ ID NO: 5966 - DNA, 25 bp, artificial sequence
  antisense probe sequence
tgccgacacacaagctctgttgagg

SEQ ID NO: 5967 - DNA, 25 bp, artificial sequence
  antisense probe sequence
ggaatgaccaggtctatcagcccct

SEQ ID NO: 5968 - DNA, 25 bp, artificial sequence
  antisense probe sequence
agcccctccgagatcgagatgatgc

SEQ ID NO: 5969 - DNA, 25 bp, artificial sequence
  antisense probe sequence
tgctcagtacagccaccttggagga

SEQ ID NO: 5970 - DNA, 25 bp, artificial sequence
  antisense probe sequence
gaagcagccattaccaactgtacct

SEQ ID NO: 5971 - DNA, 25 bp, artificial sequence
  antisense probe sequence
ccaacgcaaattcgcaaactttctt

SEQ ID NO: 5972 - DNA, 25 bp, artificial sequence
  antisense probe sequence
gctcatcggctatcgttagtgctag

SEQ ID NO: 5973 - DNA, 25 bp, artificial sequence
  antisense probe sequence
tgctagtggattttacatgtggccc

SEQ ID NO: 5974 - DNA, 25 bp, artificial sequence
  antisense probe sequence
agattggatacgcatcagacagatg

SEQ ID NO: 5975 - DNA, 25 bp, artificial sequence
  antisense probe sequence
gaggtggctgggtttacacgctaat

SEQ ID NO: 5976 - DNA, 25 bp, artificial sequence
  antisense probe sequence
gggtttacacgctaatcccgattca

SEQ ID NO: 5977 - DNA, 25 bp, artificial sequence
  antisense probe sequence
gcagtcacagctacacagatcacag

SEQ ID NO: 5978 - DNA, 25 bp, artificial sequence
  antisense probe sequence
gccttcattgccttaactggagccc

SEQ ID NO: 5979 - DNA, 25 bp, artificial sequence
  antisense probe sequence
caatgctttgcccctgagacaaatg

SEQ ID NO: 5980 - DNA, 25 bp, artificial sequence
  antisense probe sequence
gacaaatggaggcctgtcctgacct

SEQ ID NO: 5981 - DNA, 25 bp, artificial sequence
  antisense probe sequence
acctgtctcaccatgtacatagctt

SEQ ID NO: 5982 - DNA, 25 bp, artificial sequence
  antisense probe sequence
cactactgctgcagctcacaaacac

SEQ ID NO: 5983 - DNA, 25 bp, artificial sequence
  antisense probe sequence
gctcacaaacacctctgcatattac

SEQ ID NO: 5984 - DNA, 25 bp, artificial sequence
  antisense probe sequence
tctgcatattacatgtacctcctcc

SEQ ID NO: 5985 - DNA, 25 bp, artificial sequence
  antisense probe sequence
gtgtggtctattttgccatcatcac

SEQ ID NO: 5986 - DNA, 25 bp, artificial sequence
  antisense probe sequence
ggccatttcagttctcatgtgtgta

SEQ ID NO: 5987 - DNA, 25 bp, artificial sequence
  antisense probe sequence
ggttttcaaaccagtgggcacacag

SEQ ID NO: 5988 - DNA, 25 bp, artificial sequence
  antisense probe sequence
tccctctcttagtgttctttaatca

SEQ ID NO: 5989 - DNA, 25 bp, artificial sequence
  antisense probe sequence
ataactgcctggaagcctttcattt

SEQ ID NO: 5990 - DNA, 25 bp, artificial sequence
  antisense probe sequence
tggaagcctttcattttacacgccc

SEQ ID NO: 5991 - DNA, 25 bp, artificial sequence
  antisense probe sequence
cgccctgaagcagtcttctttgcta

SEQ ID NO: 5992 - DNA, 25 bp, artificial sequence
  antisense probe sequence
ttatgtggtgtgtttttccgtaata

SEQ ID NO: 5993 - DNA, 25 bp, artificial sequence
  antisense probe sequence
tctcctttctcaccaatgggcaata

SEQ ID NO: 5994 - DNA, 25 bp, artificial sequence
  antisense probe sequence
tcctttctcaccaatgggcaatagc

SEQ ID NO: 5995 - DNA, 25 bp, artificial sequence
  antisense probe sequence
tatttttcccaaagatagctttact

SEQ ID NO: 5996 - DNA, 25 bp, artificial sequence
  antisense probe sequence
gtcaaattaatgcatgctccttaca

SEQ ID NO: 5997 - DNA, 25 bp, artificial sequence
  antisense probe sequence
aatgcatgctccttacaacaaacaa

SEQ ID NO: 5998 - DNA, 25 bp, artificial sequence
  antisense probe sequence
atgctccttacaacaaacaaatatc

SEQ ID NO: 5999 - DNA, 25 bp, artificial sequence
  antisense probe sequence
gagtttaggaattctactagccaga

SEQ ID NO: 6000 - DNA, 25 bp, artificial sequence
  antisense probe sequence
actagccagagatagtcacttggag

SEQ ID NO: 6001 - DNA, 25 bp, artificial sequence
  antisense probe sequence
gatagtcacttggagaaactttcta

SEQ ID NO: 6002 - DNA, 25 bp, artificial sequence
  antisense probe sequence
gaaactttctatatatccttctaaa

SEQ ID NO: 6003 - DNA, 25 bp, artificial sequence
  antisense probe sequence
caccccactgataaccaaatcacag

SEQ ID NO: 6004 - DNA, 25 bp, artificial sequence
  antisense probe sequence
aacacctgtgctaggtcagtctggc

SEQ ID NO: 6005 - DNA, 25 bp, artificial sequence
  antisense probe sequence
gctaggtcagtctggcacgtaagat

SEQ ID NO: 6006 - DNA, 25 bp, artificial sequence
  antisense probe sequence
gtctggcacgtaagatgaacatccc

SEQ ID NO: 6007 - DNA, 25 bp, artificial sequence
  antisense probe sequence
taagatgaacatccctaccaacaca

SEQ ID NO: 6008 - DNA, 25 bp, artificial sequence
  antisense probe sequence
gagctcaccatctcttatacttaag

SEQ ID NO: 6009 - DNA, 25 bp, artificial sequence
  antisense probe sequence
atgttccctgacacatatcttgaat

SEQ ID NO: 6010 - DNA, 25 bp, artificial sequence
  antisense probe sequence
acatatcttgaatggagacctccct

SEQ ID NO: 6011 - DNA, 25 bp, artificial sequence
  antisense probe sequence
agacctccctaccaagtgatgaaag

SEQ ID NO: 6012 - DNA, 25 bp, artificial sequence
  antisense probe sequence
gggattgaggattatcttctctcag

SEQ ID NO: 6013 - DNA, 25 bp, artificial sequence
  antisense probe sequence
tcttctctcagaaaggcattgtgaa

SEQ ID NO: 6014 - DNA, 25 bp, artificial sequence
  antisense probe sequence
cctactgcaaaaccctattgtagta

SEQ ID NO: 6015 - DNA, 25 bp, artificial sequence
  antisense probe sequence
gttctctcatttaatgcacactgat

SEQ ID NO: 6016 - DNA, 25 bp, artificial sequence
  antisense probe sequence
tgagttccatcagaaggtgcccagc

SEQ ID NO: 6017 - DNA, 25 bp, artificial sequence
  antisense probe sequence
ttttttcctatctcattaggttgga

SEQ ID NO: 6018 - DNA, 25 bp, artificial sequence
  antisense probe sequence
attctgttgacccgcactttaaagc

SEQ ID NO: 6019 - DNA, 25 bp, artificial sequence
  antisense probe sequence
attgcagcatattcttctctttggc

SEQ ID NO: 6020 - DNA, 25 bp, artificial sequence
  antisense probe sequence
attcttctctttggcccagaggtgg

SEQ ID NO: 6021 - DNA, 25 bp, artificial sequence
  antisense probe sequence
gagtgtcagtattgctaagcgtggc

SEQ ID NO: 6022 - DNA, 25 bp, artificial sequence
  antisense probe sequence
gcgtggcattcacaatactggcact

SEQ ID NO: 6023 - DNA, 25 bp, artificial sequence
  antisense probe sequence
gtttttctactgccattcaatttga

SEQ ID NO: 6024 - DNA, 25 bp, artificial sequence
  antisense probe sequence
gtgagtgccttgaaaactgatcttc

SEQ ID NO: 6025 - DNA, 25 bp, artificial sequence
  antisense probe sequence
atcttcctatttgagtctcttgaga

SEQ ID NO: 6026 - DNA, 25 bp, artificial sequence
  antisense probe sequence
ctaattggttctgcccaatctcctt

SEQ ID NO: 6027 - DNA, 25 bp, artificial sequence
  antisense probe sequence
tgactgggtctagggcacccaggct

SEQ ID NO: 6028 - DNA, 25 bp, artificial sequence
  antisense probe sequence
gattcagctgatttcctaccagcct

SEQ ID NO: 6029 - DNA, 25 bp, artificial sequence
  antisense probe sequence
tatgggctgttcagaggtgcacacc

SEQ ID NO: 6030 - DNA, 25 bp, artificial sequence
  antisense probe sequence
aagagacttggtacgggccaggaag

SEQ ID NO: 6031 - DNA, 25 bp, artificial sequence
  antisense probe sequence
gaatatgtggcagagctcctggaaa

SEQ ID NO: 6032 - DNA, 25 bp, artificial sequence
  antisense probe sequence
taggtggcatttttgtcagctctgt

SEQ ID NO: 6033 - DNA, 25 bp, artificial sequence
  antisense probe sequence
gtcagctctgtggtttattgttggg

SEQ ID NO: 6034 - DNA, 25 bp, artificial sequence
  antisense probe sequence
aaatatccattgttcactacagtga

SEQ ID NO: 6035 - DNA, 25 bp, artificial sequence
  antisense probe sequence
accgtgtactatccacatgcattac

SEQ ID NO: 6036 - DNA, 25 bp, artificial sequence
  antisense probe sequence
attacaaacatttcgcagagctgct

SEQ ID NO: 6037 - DNA, 25 bp, artificial sequence
  antisense probe sequence
tgcttttggtgcgatggcactcact

SEQ ID NO: 6038 - DNA, 25 bp, artificial sequence
  antisense probe sequence
gcaatattgtttccaatactttcta

SEQ ID NO: 6039 - DNA, 25 bp, artificial sequence
  antisense probe sequence
gtgtggtgattgttcaggtcgaatc

SEQ ID NO: 6040 - DNA, 25 bp, artificial sequence
  antisense probe sequence
aggtcgaatctgttgtatccagtac

SEQ ID NO: 6041 - DNA, 25 bp, artificial sequence
  antisense probe sequence
atccagtacagctttaggtcttcag

SEQ ID NO: 6042 - DNA, 25 bp, artificial sequence
  antisense probe sequence
ctgcccttctggcgagtacatgcac

SEQ ID NO: 6043 - DNA, 25 bp, artificial sequence
  antisense probe sequence
tgcagtcatatttccagtctgcctc

SEQ ID NO: 6044 - DNA, 25 bp, artificial sequence
  antisense probe sequence
tccagtctgcctctatgatgatgtt

SEQ ID NO: 6045 - DNA, 25 bp, artificial sequence
  antisense probe sequence
gaacaagggatgtaccactggagga

SEQ ID NO: 6046 - DNA, 25 bp, artificial sequence
  antisense probe sequence
gagtatccttttgtacacattttga

SEQ ID NO: 6047 - DNA, 25 bp, artificial sequence
  antisense probe sequence
aatgcttcttctgtagtgatagaac

SEQ ID NO: 6048 - DNA, 25 bp, artificial sequence
  antisense probe sequence
gtactggcccttcggattgaaagta

SEQ ID NO: 6049 - DNA, 25 bp, artificial sequence
  antisense probe sequence
catgcttggagtgttatattctttt

SEQ ID NO: 6050 - DNA, 25 bp, artificial sequence
  antisense probe sequence
atattcttttggatgcgagccctca

SEQ ID NO: 6051 - DNA, 25 bp, artificial sequence
  antisense probe sequence
gcgagccctcaaagaaacatttaat

SEQ ID NO: 6052 - DNA, 25 bp, artificial sequence
  antisense probe sequence
ttaatattctcttttgccaattcag

SEQ ID NO: 6053 - DNA, 25 bp, artificial sequence
  antisense probe sequence
gccaattcagttgcatgctctgtgg

SEQ ID NO: 6054 - DNA, 25 bp, artificial sequence
  antisense probe sequence
gcatgctctgtggctttacttttaa

SEQ ID NO: 6055 - DNA, 25 bp, artificial sequence
  antisense probe sequence
ttacttttaaggatctgctgctcct

SEQ ID NO: 6056 - DNA, 25 bp, artificial sequence
  antisense probe sequence
atagattttccagaatttcagctgc

SEQ ID NO: 6057 - DNA, 25 bp, artificial sequence
  antisense probe sequence
aactggagataggcatcgggtgaca

SEQ ID NO: 6058 - DNA, 25 bp, artificial sequence
  antisense probe sequence
aactgctatcaagatccagcccaac

SEQ ID NO: 6059 - DNA, 25 bp, artificial sequence
  antisense probe sequence
tgaagaaagttctcctcctgatcac

SEQ ID NO: 6060 - DNA, 25 bp, artificial sequence
  antisense probe sequence
ctcctgatcacagccatcttggcag

SEQ ID NO: 6061 - DNA, 25 bp, artificial sequence
  antisense probe sequence
ccatcttggcagtggctgttggttt

SEQ ID NO: 6062 - DNA, 25 bp, artificial sequence
  antisense probe sequence
gacagcgatgaattagcttcagggt

SEQ ID NO: 6063 - DNA, 25 bp, artificial sequence
  antisense probe sequence
tccaccaattccatttccaagattt

SEQ ID NO: 6064 - DNA, 25 bp, artificial sequence
  antisense probe sequence
aagatttccatggtttagacgtaat

SEQ ID NO: 6065 - DNA, 25 bp, artificial sequence
  antisense probe sequence
tagacgtaattttcctattccaata

SEQ ID NO: 6066 - DNA, 25 bp, artificial sequence
  antisense probe sequence
ctattccaatacctgaatctgcccc

SEQ ID NO: 6067 - DNA, 25 bp, artificial sequence
  antisense probe sequence
aaagtcacgataaacctggtcacct

SEQ ID NO: 6068 - DNA, 25 bp, artificial sequence
  antisense probe sequence
aaatagcacacagcattctctagtc

SEQ ID NO: 6069 - DNA, 25 bp, artificial sequence
  antisense probe sequence
atatctttagtgatcttctttaata

SEQ ID NO: 6070 - DNA, 25 bp, artificial sequence
  antisense probe sequence
ggaacaggagcaactactaaaagag

SEQ ID NO: 6071 - DNA, 25 bp, artificial sequence
  antisense probe sequence
gatacaggatctccagacgaaaatg

SEQ ID NO: 6072 - DNA, 25 bp, artificial sequence
  antisense probe sequence
gagacgacgaaaggcatgtaccata

SEQ ID NO: 6073 - DNA, 25 bp, artificial sequence
  antisense probe sequence
ggcatgtaccataagctaaagacca

SEQ ID NO: 6074 - DNA, 25 bp, artificial sequence
  antisense probe sequence
ctaaagaccagagccttcctgtcac

SEQ ID NO: 6075 - DNA, 25 bp, artificial sequence
  antisense probe sequence
tgtcacccctaaccaaggcataatt

SEQ ID NO: 6076 - DNA, 25 bp, artificial sequence
  antisense probe sequence
gaatttggaacaagcgtcactacat

SEQ ID NO: 6077 - DNA, 25 bp, artificial sequence
  antisense probe sequence
ggaacaagcgtcactacatttgata

SEQ ID NO: 6078 - DNA, 25 bp, artificial sequence
  antisense probe sequence
aagcgtcactacatttgataataat

SEQ ID NO: 6079 - DNA, 25 bp, artificial sequence
  antisense probe sequence
aaagtttataaaggcatgtggtaca

SEQ ID NO: 6080 - DNA, 25 bp, artificial sequence
  antisense probe sequence
ggcatgtggtacaatgatcaaaatc

SEQ ID NO: 6081 - DNA, 25 bp, artificial sequence
  antisense probe sequence
aaaagatctctcactgggaaaagaa

SEQ ID NO: 6082 - DNA, 25 bp, artificial sequence
  antisense probe sequence
gttttccttgtactttattaatctg

SEQ ID NO: 6083 - DNA, 25 bp, artificial sequence
  antisense probe sequence
gaatctaatggcacttccttacgag

SEQ ID NO: 6084 - DNA, 25 bp, artificial sequence
  antisense probe sequence
cttacgagggttttcagatgtgctt

SEQ ID NO: 6085 - DNA, 25 bp, artificial sequence
  antisense probe sequence
atgactacacagacagtcctactct

SEQ ID NO: 6086 - DNA, 25 bp, artificial sequence
  antisense probe sequence
gacagtcctactctgaggagatgac

SEQ ID NO: 6087 - DNA, 25 bp, artificial sequence
  antisense probe sequence
gaagaaacccatttggaactacaca

SEQ ID NO: 6088 - DNA, 25 bp, artificial sequence
  antisense probe sequence
ggaactgcaatcctcaagagtcaca

SEQ ID NO: 6089 - DNA, 25 bp, artificial sequence
  antisense probe sequence
aagagtcacacttcatattccttcc

SEQ ID NO: 6090 - DNA, 25 bp, artificial sequence
  antisense probe sequence
ttccttcctttcaagtggttgataa

SEQ ID NO: 6091 - DNA, 25 bp, artificial sequence
  antisense probe sequence
aacatgctttttattttgactacca

SEQ ID NO: 6092 - protein, 450 aa, Haemophilus influenzae
MDPKTLALSLLAAGVLAGCSSHSSNMANTQMKSDKIIIAHRGASGYLPEHTLESKALAFAQQADYLEQDLAMTKDGRLVVIHDHFLDGLTDVAKKFPHRHRKDGRYYVIDFTLKEIQSLEMTENFETMDLEQRSQHCKPEEGLEARGEALGLVGAQAPATEEQEAASSSSTLVEVTLGEVPAAESPDPPQSPQGASSLPTTMNYPLWSQSYEDSSNQEEEGPSTFPDLESEFQAALSRKVAELVHFLLLKYRAREPVTKAEMLGSVVGNWQYFFPVIFSKASSSLQLVFGIELMEVDPIGHLYIFATCLGLSYDGLLGDNQIMPKAGLLIIVLAIIAREGDCAPEEKIWEELSVLEVFEGREDSILGDPKKLLTQHFVQENYLEYRQVPGSDPACYEFLWGPRALVETSYVKVLHHMVKISGGPHISYPPLHEWVLREGEEGGHHHHHHH

SEQ ID NO: 6093 - protein, 127 aa, artificial sequence
  fusion protein of proteinD-MAGE-3
MKLKTLALSLLAAGVLAGCSSHSSNMANTQMKSDKIIIAHRGASGYLPEHTLESKALAFAQQADYLEQDLAMTKDGRLVVIHDHFLDGLTDVAKKFPHRHRKDGRYYVIDFTLKEIQSLEMTENFET

SEQ ID NO: 6094 - protein, 9 aa, Homo sapiens
EVDPIGHLY

SEQ ID NO: 6095 - protein, 9 aa, Homo sapiens
FLWGPRALV

SEQ ID NO: 6096 - protein, 10 aa, Homo sapiens
MEVDPIGHLY

SEQ ID NO: 6097 - protein, 10 aa, Homo sapiens
VHFLLLKYRA

SEQ ID NO: 6098 - protein, 10 aa, Homo sapiens
LVHFLLLKYR

SEQ ID NO: 6099 - protein, 10 aa, Homo sapiens
LKYRAREPVT

SEQ ID NO: 6100 - protein, 16 aa, Homo sapiens
ACYEFLWGPRALVETS

SEQ ID NO: 6101 - protein, 12 aa, Homo sapiens
TQHFVQENYLEY

SEQ ID NO: 6102 - DNA, 20 bp, artificial sequence
  unmethylated CpG sequence
tccatgacgttcctgacgtt

SEQ ID NO: 6103 - DNA, 18 bp, artificial sequence
  unmethylated CpG sequence
tctcccagcgtgcgccat

SEQ ID NO: 6104 - DNA, 30 bp, artificial sequence
  unmethylated CpG sequence
accgatgacgtcgccggtgacggcaccacg

SEQ ID NO: 6105 - DNA, 24 bp, artificial sequence
  unmethylated CpG sequence
tcgtcgttttgtcgttttgtcgtt

SEQ ID NO: 6106 - DNA, 20 bp, artificial sequence
  unmethylated CpG sequence
tccatgacgttcctgatgct

1-19. (canceled)

20. A method for classifying a cancer patient as a responder or non-responder to a cancer immunotherapy comprising the steps of:
(a) obtaining a patient-derived sample and measuring the expression levels of a profile of gene products comprising the gene products of the genes recognised by the probe sets listed in Table 1 (SEQ ID NOS: 1-18); and
(b) classifying the patient as a responder or non-responder to a cancer immunotherapy based on the expression levels.

21. The method of claim 20, wherein the classification step is performed by reference to a standard.

22. The method of claim 21, wherein the standard is a patient-derived sample from a patient having a known clinical outcome.

23. A method of treating a patient comprising the steps of:
(a) obtaining a classification of the patient as a responder or non-responder to a cancer immunotherapy based on the expression levels of a profile of gene products comprising the gene products of the genes recognised by the probe sets listed in Table 1 (SEQ ID NOS: 1-18); and
(b) selecting the patient for at least one administration of an appropriate immunotherapeutic if the patient is characterized as a responder to the immunotherapeutic.

24. The method of claim 23, wherein the immunotherapeutic further comprises an adjuvant.

25. The method of claim 24, wherein the immunotherapeutic further comprises a MAGE antigen.
